United States Patent Application Publication US 2011/0004955 A1 - sequence listing, part 5

SEQ ID NO: 17390 - protein, 990 aa, Artificial
  Consensus of seq. id no 174 and its homologs
  MISC_FEATURE (1)..(1): Met or Absent
  MISC_FEATURE (2)..(2): Gly or Absent
  MISC_FEATURE (3)..(3): Gln or Asn or Absent
  MISC_FEATURE (4)..(4): Gln or Ser or Thr or Val or Ala or Absent
  MISC_FEATURE (5)..(5): Absent or Pro or Gln or Ala
  MISC_FEATURE (6)..(6): Absent or Ser or Gly or Ala or Thr
  MISC_FEATURE (7)..(7): Absent or Ser or Lys
  MISC_FEATURE (8)..(8): Absent or His or Glu or Leu or Ile
  MISC_FEATURE (9)..(9): Absent or Ala or Gln or Thr or Glu or Asp or Ser
  MISC_FEATURE (10)..(10): Absent or Ala or Gln or Arg
  MISC_FEATURE (11)..(11): Absent or Pro or Val or Ser or Glu or Asp
  MISC_FEATURE (12)..(12): Absent or Pro or Arg or Glu or Ala or Asp or Ser
  MISC_FEATURE (13)..(13): Absent or Pro or Asn or Ser or Tyr or Gln or His
  MISC_FEATURE (14)..(14): Absent or Gly
  MISC_FEATURE (15)..(15): Absent or Ala
  MISC_FEATURE (16)..(16): Absent or Met or Ser or Phe
  MISC_FEATURE (17)..(17): Absent or Asn or Tyr
  MISC_FEATURE (18)..(18): Absent or Gly or Thr or Asp or Arg or Glu or Ser
  MISC_FEATURE (19)..(19): Absent or Arg or Gly or Val or His or Gln
  MISC_FEATURE (20)..(20): Absent or Arg or His or Ser
  MISC_FEATURE (21)..(21): Absent or Gly or Pro or Thr or Ala or Ser
  MISC_FEATURE (22)..(22): Absent or Gly or Asp or Arg
  MISC_FEATURE (23)..(23): Absent or Ser or Arg or His
  MISC_FEATURE (24)..(24): Absent or Ser or Gln or Thr or Ala
  MISC_FEATURE (25)..(25): Absent or Ser or Lys or Tyr or Arg or His
  MISC_FEATURE (26)..(26): Absent or Ser or Val or Gln or Thr or Asn or Ala or Gly
  MISC_FEATURE (27)..(27): Absent or Thr or Ser or Phe or Asp or Gln or Gly or Trp
  MISC_FEATURE (28)..(28): Absent or Asn or Asp or Arg or Ser or Thr or Gly
  MISC_FEATURE (29)..(29): Absent or Thr or Tyr or Ser or Pro
  MISC_FEATURE (30)..(30): Absent or Ala or Arg or Leu or Ser or Gly
  MISC_FEATURE (31)..(31): Absent or Ser or Asn or Ala
  MISC_FEATURE (32)..(32): Absent or Ala or Ser or Gln or Pro or Thr
  MISC_FEATURE (33)..(33): Absent or Ser or Thr or Gly or Val or Ala or His
  MISC_FEATURE (34)..(34): Absent or Glu or Ser or Val or Ile or Ala or Gly
  MISC_FEATURE (35)..(35): Absent or Arg or Ser or Thr or Gly or Lys or Ala or Tyr
  MISC_FEATURE (36)..(36): Absent or Glu or Thr or Ala or Gln or Gly or Asp or Ser
  MISC_FEATURE (37)..(37): Absent or Arg or Thr or Ser or Phe or Tyr or Ala or His or Pro
  MISC_FEATURE (38)..(38): Absent or Ala or His or Ser or Arg or Asp or Tyr
  MISC_FEATURE (39)..(39): Absent or Ser or Gly or Glu or Arg
  MISC_FEATURE (40)..(40): Absent or Ser or Ala or Glu or Pro
  MISC_FEATURE (41)..(41): Absent or Ser or Ala or Gly
  MISC_FEATURE (42)..(42): Absent or Ala or Ser or Gly or Gln or Asp
  MISC_FEATURE (43)..(43): Absent or Gln or Ser or Ala or Thr or Glu or Gly or Arg
  MISC_FEATURE (44)..(44): Absent or Pro or Met or Arg or Ile or His
  MISC_FEATURE (45)..(45): Absent or Ile or Asp or Ser or His or Asn
  MISC_FEATURE (46)..(46): Gln or Absent or Asn or Glu or Ala or Ser
  MISC_FEATURE (47)..(47): Thr or Ser or Pro or Ala or Asp or Glu or Absent
  MISC_FEATURE (48)..(48): Lys or Ser or Arg or Gly or Absent
  MISC_FEATURE (49)..(49): Glu or Ser or Thr or Gly or Ala or Val or Absent
  MISC_FEATURE (50)..(50): Thr or Ser or Ala or Val or Lys or Arg or Tyr or Absent
  MISC_FEATURE (51)..(51): Gly or Ser or Arg or Thr or Ala or Absent
  MISC_FEATURE (52)..(52): Ala or Arg or Glu or Ser or Leu or His or Absent
  MISC_FEATURE (53)..(53): Ala or His or Ile or Asp or Asn or Arg or Absent
  MISC_FEATURE (54)..(54): Gly or Gln or Tyr or Thr or Ala or Asn or Ser or Absent
  MISC_FEATURE (55)..(55): Ser or Glu or Arg or His or Thr or Asn or Gly or Absent
  MISC_FEATURE (56)..(56): Ser or Asp or Pro or Arg or Absent
  MISC_FEATURE (57)..(57): Absent or Ser or Leu or Gly or Pro
  MISC_FEATURE (58)..(58): Absent or Leu or Val or Ser or Asp
  MISC_FEATURE (59)..(59): Absent or Tyr or Gly or Asn or Thr or Phe or Leu
  MISC_FEATURE (60)..(60): Absent or Gly or Asn or Ser or Ala
  MISC_FEATURE (61)..(61): Absent or Ile or Leu or Phe
  MISC_FEATURE (62)..(62): Absent or Val or Leu
  MISC_FEATURE (63)..(63): Absent or Ser or Asn or Gly
  MISC_FEATURE (64)..(64): Absent or Ser or Gly or Ile or Leu
  MISC_FEATURE (65)..(65): Absent or Ala or Gly or Pro
  MISC_FEATURE (66)..(66): Absent or Thr or Gly or Asn or Ala
  MISC_FEATURE (67)..(67): Absent or Ser or Val or Asn or Glu
  MISC_FEATURE (68)..(68): Absent or Ser or Ala or Arg
  MISC_FEATURE (69)..(69): Absent or Ser or Arg or Glu or Asp
  MISC_FEATURE (70)..(70): Absent or Asn or Ala or Thr or Pro or Arg
  MISC_FEATURE (71)..(71): Absent or His or Glu or Asp or Lys or Arg
  MISC_FEATURE (72)..(72): Absent or His or Ser or Pro or Thr or Val
  MISC_FEATURE (73)..(73): Absent or Asn or Tyr or Thr or Gly or Asp or Ala
  MISC_FEATURE (74)..(74): Absent or Arg or Gly or Ser or Pro or Thr
  MISC_FEATURE (75)..(75): Absent or Ser or Gly or Glu or His or Ala or Ile
  MISC_FEATURE (76)..(76): Absent or Gly or Val or Leu
  MISC_FEATURE (77)..(77): Absent or Ser or Glu
  MISC_FEATURE (78)..(78): Absent or Lys or Pro or His
  MISC_FEATURE (79)..(79): Absent or Lys or Arg
  MISC_FEATURE (80)..(80): Absent or Gln or Arg
  MISC_FEATURE (81)..(81): Absent or His or Leu or Glu
  MISC_FEATURE (82)..(82): Ala or Thr or Ser or Absent or Asp
  MISC_FEATURE (83)..(83): Ala or Val or Glu or Leu or Thr or Lys or Arg or Absent
  MISC_FEATURE (84)..(84): Gln or Asp or Ser or Gly or Arg or Tyr or Ala or Absent
  MISC_FEATURE (85)..(85): Tyr or Phe or Gln or Lys or Arg or Glu or Absent
  MISC_FEATURE (86)..(86): Ser or Gly or His or Val or Leu or Arg or Lys or Absent
  MISC_FEATURE (87)..(87): Ser or Absent or Arg or Lys or Glu
  MISC_FEATURE (88)..(88): His or Ala or Gly or Ser or Arg or Val or Thr or Absent
  MISC_FEATURE (89)..(89): Thr or Leu or Lys or Gln or Ala or Ser or Arg or Absent
  MISC_FEATURE (90)..(90): Arg or Val or Thr or Glu or Lys or Absent
  MISC_FEATURE (91)..(91): Ser or Pro or Glu or Leu or Arg or Absent
  MISC_FEATURE (92)..(92): Ser or Pro or Lys or Arg or Glu or Absent
  MISC_FEATURE (93)..(93): Ser or Gly or Thr or Ala or Glu or Asp or Lys or Absent
  MISC_FEATURE (94)..(94): Arg or Val or Ser or Pro or Gln or Leu or Glu or Absent
  MISC_FEATURE (95)..(95): Gly or Tyr or Pro or Arg or Ala or Leu or Asn or Absent
  MISC_FEATURE (96)..(96): Met or Thr or Pro or Glu or Gln or Arg or Lys or Val or Ala or Absent
  MISC_FEATURE (97)..(97): Ser or Gly or Lys or Ile or Glu or Ala or Absent
  MISC_FEATURE (98)..(98): Pro or Lys or Gln or Glu or Ala or Arg or Absent
  MISC_FEATURE (99)..(99): Absent or Pro or Arg or His or Asn or Ala or Ile or Met
  MISC_FEATURE (100)..(100): Absent or Pro or Glu or Tyr or Ala or Gln or Lys or Gly
  MISC_FEATURE (101)..(101): Absent or Pro or Met or Leu or Lys or Glu or Asn
  MISC_FEATURE (102)..(102): Absent or Ser or Arg or Gln or Lys or Asn
  MISC_FEATURE (103)..(103): Absent or Thr or Val or Leu or Glu or Gln or Ile
  MISC_FEATURE (104)..(104): Absent or Pro or Phe or Ile or Val or Lys or Arg or Thr or Gly
  MISC_FEATURE (105)..(105): Absent or Pro or Val or Ile or Ser or Gly
  MISC_FEATURE (106)..(106): Absent or Leu or Asp or Lys or Arg or Met
  MISC_FEATURE (107)..(107): Absent or Leu or Pro or Phe or Ser or Tyr or Cys or Arg or Lys
  MISC_FEATURE (108)..(108): Absent or Pro or Asn or Glu or Ser or Cys or Arg or Lys
  MISC_FEATURE (109)..(109): Absent or Tyr or Glu or Pro or Ser or His or Thr or Gln or Ala
  MISC_FEATURE (110)..(110): Absent or Ala or Gln or Ser or Thr or Gly or His or Lys or Val or Ile
  MISC_FEATURE (112)..(112): Absent or His or Asp or Pro or Glu
  MISC_FEATURE (113)..(113): Absent or Leu or Gly or Glu or Asp
  MISC_FEATURE (114)..(114): Absent or Ser or Gly or Glu or Arg or Lys
  MISC_FEATURE (116)..(116): Absent or Gln or Leu or Thr or Arg
  MISC_FEATURE (117)..(117): Absent or Asn or Val or Ala or Arg or Lys
  MISC_FEATURE (119)..(119): Absent or His or Gln or Phe or Tyr or Leu
  MISC_FEATURE (120)..(120): Absent or Cys or Gly or Gln
  MISC_FEATURE (121)..(121): Absent or Leu or Val or Thr or Ser or Cys or Gly
  MISC_FEATURE (122)..(122): Absent or Ser or Tyr or Leu or Gly
  MISC_FEATURE (123)..(123): Absent or His or Thr or Lys or Arg or Ser or Val or Leu
  MISC_FEATURE (124)..(124): Absent or Pro or Gly or Ser or Leu or Phe or Tyr
  MISC_FEATURE (125)..(125): Absent or Gln or Pro or Asn or Glu or Asp or Thr or Val or Met
  MISC_FEATURE (126)..(126): Absent or Ala or Lys or Ser or Gln or His or Asn
  MISC_FEATURE (127)..(127): Absent or Arg or His or Gln or Leu or Met or Glu or Ser or Lys
  MISC_FEATURE (129)..(129): Val or Trp or Tyr or Phe or Absent or Ile
  MISC_FEATURE (131)..(131): Ala or Gln or Lys or Ile or Cys or Ser or Val or Absent or His or Phe
  MISC_FEATURE (132)..(132): Asn or Ala or Ser or Leu or Asp or Pro or Thr or Lys or Arg or Absent
  MISC_FEATURE (133)..(133): Met or Ile or Ala or Val or Lys or Absent
  MISC_FEATURE (134)..(134): Ile or Val or Leu or Absent
  MISC_FEATURE (135)..(135): Ala or Ser or Thr or Lys or Arg or Gln or Absent
  MISC_FEATURE (136)..(136): Ser or Gln or Lys or Asn or Gly or Arg or Absent
  MISC_FEATURE (139)..(139): Ala or Leu or Thr or Ile or Val or Absent
  MISC_FEATURE (140)..(140): Ala or Asp or Ser or Asn or Glu or Lys or Absent
  MISC_FEATURE (141)..(141): Ser or Arg or Gly or Lys or Ala or Absent or Thr
  MISC_FEATURE (146)..(146): Ser or Phe or Cys or Absent
  MISC_FEATURE (147)..(147): Pro or Tyr or Phe or Trp or His or Absent
  MISC_FEATURE (148)..(148): Pro or Arg or Lys or Thr or Ile or Met or Phe or Absent
  MISC_FEATURE (150)..(150): Leu or Ala or Glu or Asp or Tyr or Absent or Lys
  MISC_FEATURE (151)..(151): Pro or Glu or Gln or Asn or Asp or Absent
  MISC_FEATURE (152)..(152): Ala or Glu or Asp or Absent
  MISC_FEATURE (153)..(153): His or Tyr or Phe or Cys or Ala or Ser or Pro or Thr or Absent
  MISC_FEATURE (154)..(154): Leu or Asp or Glu or Ser or Ala or Asn or Cys or Thr or Pro or Absent
  MISC_FEATURE (155)..(155): Ala or Glu or Asp or Ser or Absent or Pro
  MISC_FEATURE (156)..(156): Asp or Ser or Glu or Gly or Thr or Absent
  MISC_FEATURE (157)..(157): Ser or Trp or Absent or Gly
  MISC_FEATURE (158)..(158): Val or Asp or Thr or Absent or Ser or Gly or Ala
  MISC_FEATURE (159)..(159): Lys or Asp or Glu or Arg or Absent or Cys or His or Ala
  MISC_FEATURE (160)..(160): Val or Asp or Glu or His or Absent or Ala or Thr or Tyr or Asn or Leu or Gly
  MISC_FEATURE (161)..(161): Asp or Gln or Glu or Gly or Absent
  MISC_FEATURE (162)..(162): Gln or Ile or Leu or Val or Phe or Arg or Absent
  MISC_FEATURE (163)..(163): Gly or Leu or Met or Cys or Val or Lys or Ile or Absent
  MISC_FEATURE (164)..(164): Gly or Ala or Arg or Ile or Lys or Absent
  MISC_FEATURE (165)..(165): Leu or Ala or Ile or Val or Absent
  MISC_FEATURE (166)..(166): Val or Arg or Leu or Ile or Ala or Absent
  MISC_FEATURE (167)..(167): Pro or Lys or Thr or Arg or Gly or Asp or Asn or Absent
  MISC_FEATURE (168)..(168): Tyr or Glu or Gly or Gln or Ser or Ala or Absent
  MISC_FEATURE (169)..(169): Gly or Phe or Thr or Leu or Arg or Met or Absent
  MISC_FEATURE (170)..(170): Val or Arg or Pro or Thr or Leu or Absent
  MISC_FEATURE (171)..(171): Tyr or Asp or Glu or Ile or Leu or Absent
  MISC_FEATURE (172)..(172): Absent or Lys or Pro or His
  MISC_FEATURE (173)..(173): Absent or Asp or Ser or Ala or Pro
  MISC_FEATURE (174)..(174): Absent or Tyr or Ala or Pro or Thr
  MISC_FEATURE (175)..(175): Absent or Ala or Leu or Phe or Asp
  MISC_FEATURE (176)..(176): Absent or Glu or Ser or Asn or Asp
  MISC_FEATURE (177)..(177): Absent or Gly or Glu or Pro or Ile or Val
  MISC_FEATURE (178)..(178): Absent or Val or Ser or Gly or Glu or His or Asn or Pro
  MISC_FEATURE (179)..(179): Absent or Ala or Pro or Tyr or Val or Leu
  MISC_FEATURE (180)..(180): Absent or Asn or Thr or Glu
  MISC_FEATURE (181)..(181): Absent or Thr or Glu or Leu
  MISC_FEATURE (182)..(182): Absent or Glu or Pro
  MISC_FEATURE (183)..(183): Absent or Ser or Gln or Tyr
  MISC_FEATURE (184)..(184): Absent or Thr or Arg or Lys
  MISC_FEATURE (185)..(185): Absent or Asp or Pro or Ile or Asn
  MISC_FEATURE (186)..(186): Absent or Thr or Ser or Pro
  MISC_FEATURE (187)..(187): Absent or Lys or Asn or Ser or Pro
  MISC_FEATURE (188)..(188): Absent or Asp or His or Lys
  MISC_FEATURE (189)..(189): Absent or Ala or Leu or Ser or Val
  MISC_FEATURE (190)..(190): Absent or Ser or Val
  MISC_FEATURE (191)..(191): Absent or Ala or Pro or Glu
  MISC_FEATURE (192)..(192): Absent or Ser or Ala or Glu
  MISC_FEATURE (193)..(193): Absent or Thr or Trp or Lys or Ala
  MISC_FEATURE (194)..(194): Absent or Ser or Asn or Gln or Lys
  MISC_FEATURE (195)..(195): Absent or Thr or Pro or Glu
  MISC_FEATURE (196)..(196): Absent or Pro or Arg or Ala
  MISC_FEATURE (197)..(197): Absent or His or Gly or Glu or Ser
  MISC_FEATURE (198)..(198): Absent or Ala or Ser or Asn
  MISC_FEATURE (199)..(199): Absent or Ile or Glu
  MISC_FEATURE (200)..(200): Absent or Ser or Arg or Gln
  MISC_FEATURE (201)..(201): Absent or Thr or Asn or Ser
  MISC_FEATURE (202)..(202): Absent or Pro or Leu or Val
  MISC_FEATURE (203)..(203): Absent or Ser or Asn or Glu or Gln
  MISC_FEATURE (204)..(204): Absent or His or Asp or Phe or Tyr or Asn or Thr
  MISC_FEATURE (205)..(205): Absent or Leu or Asp or Glu
  MISC_FEATURE (206)..(206): Absent or Ser or Asp or Gly or Thr or Met
  MISC_FEATURE (207)..(207): Absent or Pro or Glu or Val
  MISC_FEATURE (208)..(208): Absent or Pro or Glu
  MISC_FEATURE (209)..(209): Absent or Thr or Glu or Leu or Val or Ile
  MISC_FEATURE (210)..(210): Absent or Ala or Asp or Gly or Thr
  MISC_FEATURE (211)..(211): Absent or Pro or Asp or Asn or Ser
  MISC_FEATURE (212)..(212): Absent or Pro or Ile or Leu or Arg
  MISC_FEATURE (213)..(213): Absent or Gln or Asp or Gly or Asn or Arg or Ser
  MISC_FEATURE (214)..(214): Absent or Val or Asn or Glu or Lys or Met or Gln or Ala
  MISC_FEATURE (215)..(215): Absent or Ala or His or Pro or Ser
  MISC_FEATURE (216)..(216): Absent or Ile or Lys or Asp or His or Thr or Gln or Tyr or Asn
  MISC_FEATURE (217)..(217): Absent or Ser or Ile or Phe or Asn or Gly
  MISC_FEATURE (218)..(218): Absent or Ser or Pro or His or Asp or Asn
  MISC_FEATURE (219)..(219): Absent or Tyr or Pro or Lys or Ala or Glu or Asp
  MISC_FEATURE (220)..(220): Absent or Ser or Thr or Arg or Leu or Val
  MISC_FEATURE (221)..(221): Absent or Ser or Glu or His or Ala or Val or Ile
  MISC_FEATURE (222)..(222): Absent or Gly or Arg or Thr or Asn or Asp
  MISC_FEATURE (223)..(223): Absent or Asp or Ala or Leu or Tyr or Lys or Thr
  MISC_FEATURE (224)..(224): Absent or Gln or Lys or Ser or Tyr or Thr or Leu
  MISC_FEATURE (225)..(225): Absent or Pro or Glu or Ser or Lys or Leu or His
  MISC_FEATURE (226)..(226): Thr or Asp or Glu or Asn or Arg or Ser or Pro or Ile or Absent
  MISC_FEATURE (227)..(227): Gly or Ser or Arg or Asn or Gln or Lys or Absent
  MISC_FEATURE (228)..(228): Pro or Gln or Glu or Arg or Lys or His or Absent
  MISC_FEATURE (229)..(229): Lys or Ser or Gly or Phe or Glu or Pro or Absent
  MISC_FEATURE (230)..(230): Asp or Arg or Gly or Lys or Gln or Ala or Absent
  MISC_FEATURE (231)..(231): Tyr or Ser or Asp or Ala or Arg or Lys or Phe or Absent or His
  MISC_FEATURE (232)..(232): Asp or Ser or Pro or Lys or Arg or Thr or Absent
  MISC_FEATURE (233)..(233): Gln or His or Ile or Leu or Met or Absent
  MISC_FEATURE (234)..(234): His or Gly or Glu or Lys or Arg or Pro or Ser or Absent
  MISC_FEATURE (235)..(235): Phe or Ser or Asn or His or Ala or Pro or Absent
  MISC_FEATURE (236)..(236): Val or Phe or Met or Leu or Lys or Pro or Ala or Absent
  MISC_FEATURE (237)..(237): Arg or Ser or Thr or Ile or Absent
  MISC_FEATURE (238)..(238): Gln or Ser or Lys or His or Asn or Phe or Absent
  MISC_FEATURE (239)..(239): Ser or Lys or Leu or Arg or Pro or Absent
  MISC_FEATURE (240)..(240): Ile or His or Met or Arg or Val or Ala or Gly or Absent
  MISC_FEATURE (241)..(241): Val or His or Gly or Ile or Lys or Arg or Ala or Absent
  MISC_FEATURE (242)..(242): Asp or Ser or Ile or Glu or Leu or Ala or Absent
  MISC_FEATURE (243)..(243): Arg or Ser or His or Leu or Tyr or Asn or Gly or Absent
  MISC_FEATURE (244)..(244): Arg or Lys or Asp or Gln or Ser or Pro or Thr or Absent
  MISC_FEATURE (245)..(245): Leu or Ser or Asn or Lys or Thr or Absent
  MISC_FEATURE (246)..(246): Ala or Ser or Lys or Thr or Absent or Arg or Asn
  MISC_FEATURE (247)..(247): Pro or His or Glu or Thr or Absent or Ile or Leu or Ser
  MISC_FEATURE (248)..(248): Phe or Ser or Leu or Absent or Arg or Pro
  MISC_FEATURE (249)..(249): Cys or Lys or Arg or Ser or Absent or Trp or Phe or Leu
  MISC_FEATURE (250)..(250): Lys or Arg or Gln or Absent or Phe or Leu
  MISC_FEATURE (251)..(251): Gly or Pro or Glu or Ser or Absent or Arg
  MISC_FEATURE (252)..(252): Thr or Asn or Gly or Ala or Asp or Glu or Ser or Absent
  MISC_FEATURE (253)..(253): Asp or Gly or Glu or Pro or Arg or Absent
  MISC_FEATURE (254)..(254): Asp or Gly or Lys or Thr or Glu or Asn or Ala or Absent
  MISC_FEATURE (255)..(255): Glu or Lys or Pro or Gln or Ser or Asn or Absent
  MISC_FEATURE (256)..(256): Asp or Glu or Ser or Lys or Ala or Thr or Absent
  MISC_FEATURE (257)..(257): Absent or Arg or Trp or Tyr or Phe or Leu
  MISC_FEATURE (258)..(258): Absent or Phe or Glu or Met or Leu or Ala
  MISC_FEATURE (259)..(259): Absent or Arg or Asp or Glu or Ser
  MISC_FEATURE (260)..(260): Absent or Ser or Glu or Leu or Arg
  MISC_FEATURE (261)..(261): Absent or Gly or Lys or Ala or Thr
  MISC_FEATURE (262)..(262): Absent or Glu or Gln or Leu or Ser or Thr
  MISC_FEATURE (263)..(263): Absent or Pro or Lys or Glu or Gln or Gly
  MISC_FEATURE (264)..(264): Absent or Asp or Asn or Ala or Met or Ser
  MISC_FEATURE (265)..(265): Absent or Gln or Phe or Arg or Lys or Ser
  MISC_FEATURE (266)..(266): Absent or Glu or Arg or Asn or Lys or His
  MISC_FEATURE (267)..(267): Absent or Asp or Ile or Thr or Asn
  MISC_FEATURE (268)..(268): Absent or Gly or Ser or Pro
  MISC_FEATURE (269)..(269): Absent or Asp or Ser or Gln or Ala
  MISC_FEATURE (270)..(270): Absent or Glu or Lys or Thr or Ser or Val
  MISC_FEATURE (271)..(271): Absent or Leu or Ser or Asp
  MISC_FEATURE (272)..(272): Absent or Ile or Ser or Met
  MISC_FEATURE (273)..(273): Absent or Asn or Ala or Thr
  MISC_FEATURE (274)..(274): Absent or Pro or Val
  MISC_FEATURE (275)..(275): Absent or Gly or Glu or Gln or Arg
  MISC_FEATURE (276)..(276): Absent or Ile or Arg or Asp or Glu
  MISC_FEATURE (277)..(277): Absent or Leu or Thr or Asn or Ile
  MISC_FEATURE (278)..(278): Absent or Gln or Gly or Asp or Thr or Asn
  MISC_FEATURE (279)..(279): Absent or Ser or Val or Ile or Leu
  MISC_FEATURE (280)..(280): Absent or Pro or Ser
  MISC_FEATURE (281)..(281): Absent or Pro or Gln
  MISC_FEATURE (282)..(282): Absent or Ser or Pro
  MISC_FEATURE (283)..(283): Absent or Arg
  MISC_FEATURE (284)..(284): Absent or Glu or Lys or Arg
  MISC_FEATURE (285)..(285): Absent or Ala or Asn or Ser or Asp
  MISC_FEATURE (286)..(286): Absent or Pro or Lys or Ala or Ser or Tyr
  MISC_FEATURE (287)..(287): Absent or Lys or Asp or Cys or Phe or His or Tyr
  MISC_FEATURE (288)..(288): Absent or Pro or Cys or Leu or Val
  MISC_FEATURE (289)..(289): Absent or Pro or Asn
  MISC_FEATURE (290)..(290): Absent or Pro or Ser or Asn or Gly
  MISC_FEATURE (291)..(291): Absent or Ser or Arg or Asp or Gln
  MISC_FEATURE (292)..(292): Absent or Arg
  MISC_FEATURE (293)..(293): Absent or Gln
  MISC_FEATURE (294)..(294): Absent or Arg
  MISC_FEATURE (295)..(295): Absent or Ala
  MISC_FEATURE (296)..(296): Absent or Lys
  MISC_FEATURE (297)..(297): Absent or Thr
  MISC_FEATURE (298)..(298): Absent or Leu
  MISC_FEATURE (299)..(299): Absent or Thr
  MISC_FEATURE (300)..(300): Absent or Asn
  MISC_FEATURE (301)..(301): Absent or Lys
  MISC_FEATURE (302)..(302): Absent or Glu
  MISC_FEATURE (303)..(303): Absent or Pro
  MISC_FEATURE (304)..(304): Absent or Arg or Pro or Asp
  MISC_FEATURE (305)..(305): Absent or Pro or Arg or Leu or Ala or Ile
  MISC_FEATURE (306)..(306): Glu or Met or Leu or Lys or Absent
  MISC_FEATURE (307)..(307): Leu or Val or Arg or Trp or Tyr or Ala or Absent
  MISC_FEATURE (308)..(308): Ala or Arg or Lys or Asp or Thr or Phe or Tyr or Absent
  MISC_FEATURE (309)..(309): Asp or Val or Ala or Ile or Leu or Absent
  MISC_FEATURE (310)..(310): Ser or Tyr or Absent
  MISC_FEATURE (311)..(311): Lys or Arg or Leu or Ala or Absent
  MISC_FEATURE (312)..(312): Phe or Gly or Asn or Asp or Gln or Absent
  MISC_FEATURE (313)..(313): Asn or Ala or Pro or Gly or Absent
  MISC_FEATURE (314)..(314): Ser or Ile or Val or Ala or Glu or Asp or Absent
  MISC_FEATURE (322)..(322): Asn or Tyr or Ser or Phe or His or Absent
  MISC_FEATURE (323)..(323): Tyr or Phe or Leu or Absent or Ala
  MISC_FEATURE (325)..(325): Thr or Pro or Asn or Lys or Glu or Met or Gly or Absent
  MISC_FEATURE (326)..(326): Pro or Asn or Ser or His or Tyr or Val or Absent
  MISC_FEATURE (327)..(327): Leu or Ile or Met or Phe or Val or Absent
  MISC_FEATURE (329)..(329): Phe or His or Thr or Met or Ile or Val or Tyr or Lys or Arg or Absent or Ser
  MISC_FEATURE (331)..(331): Arg or Lys or Leu or Absent
  MISC_FEATURE (334)..(334): His or Asp or Gln or Ala or Leu or Ser or Thr or Met or Absent or Lys
  MISC_FEATURE (335)..(335): Gln or Lys or Absent or Met
  MISC_FEATURE (336)..(336): Pro or Ala or Arg or Gly or Ser or Absent
  MISC_FEATURE (339)..(339): Thr or Ser or Absent or Glu
  MISC_FEATURE (343)..(343): Val or Absent or Leu or Ser
  MISC_FEATURE (344)..(344): Gln or Absent or Arg or Tyr
  MISC_FEATURE (345)..(345): Met or Ile or Absent or Val
  MISC_FEATURE (347)..(347): Arg or Absent or Ser or Asn or Val or Pro
  MISC_FEATURE (348)..(348): Ala or Ser or Leu or Gln or Pro or Absent or Thr
  MISC_FEATURE (349)..(349): Asp or Glu or Absent or Arg or His or Asn or Ser
  MISC_FEATURE (350)..(350): Pro or Absent or Thr or Val or Ser
  MISC_FEATURE (351)..(351): Thr or His or Absent or Ala or Ser
  MISC_FEATURE (352)..(352): Ser or Thr or Ile or Pro or Trp or Phe or Absent or Arg or Gln
  MISC_FEATURE (353)..(353): Thr or Arg or Pro or Ser or Absent
  MISC_FEATURE (354)..(354): Asn or His or Glu or Absent or Ile or Thr
  MISC_FEATURE (355)..(355): Pro or Leu or Asp or His or Absent or Gln
  MISC_FEATURE (356)..(356): Pro or Val or Glu or Asp or His or Ala or Absent or Lys
  MISC_FEATURE (357)..(357): Ser or Pro or Gln or Val or Gly or Asp or Absent or Phe
  MISC_FEATURE (358)..(358): Ser or Absent or Glu or Asp or Leu
  MISC_FEATURE (359)..(359): Absent or Pro or Asp or Ile
  MISC_FEATURE (360)..(360): Absent or Ser or Asn
  MISC_FEATURE (361)..(361): Absent or Asn or Leu
  MISC_FEATURE (362)..(362): Absent or Ala
  MISC_FEATURE (363)..(363): Absent or Pro
  MISC_FEATURE (364)..(364): Absent or Asn
  MISC_FEATURE (365)..(365): Absent or Ala or Ser or Thr or Asp or Asn or Pro
  MISC_FEATURE (366)..(366): Absent or Gln or Glu or Ala or Ser
  MISC_FEATURE (367)..(367): Absent or Pro or Glu or Gly
  MISC_FEATURE (368)..(368): Absent or Gln or Thr or Glu
  MISC_FEATURE (369)..(369): Absent or Asn or Lys or Thr or Pro
  MISC_FEATURE (370)..(370): Absent or Gln or Asp or Asn or Ala or Thr or Glu
  MISC_FEATURE (371)..(371): Absent or Asp or Glu or Pro or His or Arg
  MISC_FEATURE (372)..(372): Absent or Thr or Ala or Glu or Asn or Ser or Pro or Gln or Met
  MISC_FEATURE (373)..(373): Absent or Leu or Gly or Asp or Glu or Pro
  MISC_FEATURE (374)..(374): Absent or Leu or Glu or Lys or Gln or Val or Phe
  MISC_FEATURE (375)..(375): Absent or Gly or Leu or Asp or Glu or Pro or Gln or Phe
  MISC_FEATURE (376)..(376): Absent or Gln or Pro or Glu or Asp
  MISC_FEATURE (377)..(377): Absent or Leu or His or Asp or Asn or Ser or Gly or Ile or Phe
  MISC_FEATURE (378)..(378): Absent or Asp or Arg or Leu or Gln or Val
  MISC_FEATURE (379)..(379): Absent or Leu or Ser
  MISC_FEATURE (380)..(380): Absent or Ile or Thr or Val or Ser
  MISC_FEATURE (381)..(381): Absent or Ser or Leu
  MISC_FEATURE (382)..(382): Glu or Thr or Absent
  MISC_FEATURE (383)..(383): Pro or Absent or Phe
  MISC_FEATURE (384)..(384): Arg or Ala or Thr or Absent or Met
  MISC_FEATURE (385)..(385): Ser or Ala or Cys or Asn or Absent or Arg
  MISC_FEATURE (388)..(388): Phe or Tyr or Absent
  MISC_FEATURE (390)..(390): Val or Ala or Absent or Lys
  MISC_FEATURE (391)..(391): Glu or Gln or Met or Ser or Thr or Absent
  MISC_FEATURE (392)..(392): Pro or Glu or Ala or Ser or Absent or Tyr
  MISC_FEATURE (393)..(393): Asp or Asn or Ser or Glu or Absent or Gln
  MISC_FEATURE (394)..(394): Phe or Absent or Tyr
  MISC_FEATURE (395)..(395): Gly or Ser or Absent or Ala
  MISC_FEATURE (397)..(397): Thr or Val or Ile or Met or Ala or Absent or Glu or Asp
  MISC_FEATURE (399)..(399): Thr or Asn or Glu or Ser or Lys or Gln or Val or Absent or Arg or Ala
  MISC_FEATURE (400)..(400): Pro or Arg or Absent or Gly or Ala
  MISC_FEATURE (401)..(401): Pro or Arg or Absent or Val or Ala or Gly
  MISC_FEATURE (402)..(402): Glu or Pro or His or Ile or Ala or Thr or Absent or Lys
  MISC_FEATURE (403)..(403): Ser or Trp or Thr or Gly or Asp or Asn or Phe or Absent
  MISC_FEATURE (404)..(404): Ile or Arg or Pro or Absent or Leu or Lys
  MISC_FEATURE (405)..(405): Glu or Ala or Met or Gly or His or Ile or Lys or Arg or Absent
  MISC_FEATURE (406)..(406): His or Gly or Ser or Ala or Thr or Leu or Val or Absent or Glu
  MISC_FEATURE (407)..(407): Ala or Ile or Ser or Lys or Gly or Leu or Absent or Arg or Cys
  MISC_FEATURE (408)..(408): Arg or Gly or Leu or Ala or Ile or Val or Absent or Ser or Pro
  MISC_FEATURE (409)..(409): Arg or Ser or Ala or Asp or Gln or Gly or Tyr or Absent or Ile or Met or Leu or Phe
  MISC_FEATURE (410)..(410): Ser or Glu or Gly or Asn or Ala or Absent or Cys
  MISC_FEATURE (411)..(411): Ser or Gly or Thr or Ala or Ile or Gln or Met or Absent
  MISC_FEATURE (412)..(412): Ala or Asn or Lys or Pro or Gln or Ser or Asp or Absent
  MISC_FEATURE (413)..(413): Ser or Leu or Pro or Ala or Gly or Absent
  MISC_FEATURE (414)..(414): Gly or Pro or Ala or Ser or Asn or Asp or Gln or Absent
  MISC_FEATURE (415)..(415): Gly or Ile or Thr or Asp or Ser or Absent or Pro or Val
  MISC_FEATURE (416)..(416): Asp or Thr or Ser or Ala or Tyr or Absent or Pro or His or Arg
  MISC_FEATURE (417)..(417): Ser or Pro or Ala or Lys or Absent
  MISC_FEATURE (418)..(418): Pro or Ala or Val or Absent
  MISC_FEATURE (419)..(419): Asn or Asp or Glu or Ala or Ser or Absent
  MISC_FEATURE (420)..(420): Asp or Val or Ala or Lys or Pro or Absent
  MISC_FEATURE (421)..(421): Ala or Asn or Gly or Absent or Pro
  MISC_FEATURE (422)..(422): Thr or Arg or Absent or Ile
  MISC_FEATURE (423)..(423): Asp or Absent or Pro or Val
  MISC_FEATURE (424)..(424): Ala or Absent or Ser or Glu
  MISC_FEATURE (425)..(425): Ala or Absent or Phe or Glu
  MISC_FEATURE (426)..(426): Asn or Absent or Gly or Ser
  MISC_FEATURE (427)..(427): Absent or Gln or Glu
  MISC_FEATURE (428)..(428): Absent or Ser
  MISC_FEATURE (429)..(429): Absent or Ala
  MISC_FEATURE (430)..(430): Absent or Ile
  MISC_FEATURE (431)..(431): Absent or Asp
  MISC_FEATURE (432)..(432): Absent or Asp
  MISC_FEATURE (433)..(433): Absent or Asp
  MISC_FEATURE (434)..(434): Absent or Gly
  MISC_FEATURE (435)..(435): Absent or Asp
  MISC_FEATURE (436)..(436): Absent or Asn
  MISC_FEATURE (437)..(437): Absent or Ser
  MISC_FEATURE (438)..(438): Absent or Ser
  MISC_FEATURE (439)..(439): Absent or Asn
  MISC_FEATURE (440)..(440): Absent or Gly
  MISC_FEATURE (441)..(441): Absent or Gly or Ser or Leu or Ala or Pro
  MISC_FEATURE (442)..(442): Absent or Asn or Thr or Gly or Leu
  MISC_FEATURE (443)..(443): Absent or Ala or Gly or Thr or Ser or Ile
  MISC_FEATURE (444)..(444): Absent or Phe or Asp or Gly or Ala or Asn
  MISC_FEATURE (445)..(445): Absent or Ser or Glu or Lys or Thr
  MISC_FEATURE (446)..(446): Absent or Val or Ser or Gly or Thr
  MISC_FEATURE (447)..(447): Absent or Gly or Ala or Glu or Pro
  MISC_FEATURE (448)..(448): Absent or Ser or Ile or Val or Leu or Met or Ala
  MISC_FEATURE (449)..(449): Phe or Absent or Asp or Thr or Ser or Tyr
  MISC_FEATURE (450)..(450): Ala or Absent or Asp or Ser or Lys
  MISC_FEATURE (451)..(451): Glu or Absent or Ser or Asn or Cys or Pro or Asp or Thr or Ala
  MISC_FEATURE (452)..(452): Met or Absent or Leu or Gly or Ser or Ala
  MISC_FEATURE (453)..(453): Ala or Absent or Asp or Gly or Ser
  MISC_FEATURE (454)..(454): Ile or Absent or Val or Ser or Thr or Pro or Leu
  MISC_FEATURE (455)..(455): Gly or Arg or Ser or Ala or Pro or Asn or Val or Absent
  MISC_FEATURE (456)..(456): Thr or Ile or Pro or Asp or Ala or His or Absent or Arg or Ser
  MISC_FEATURE (457)..(457): Gly or Glu or Ala or His or Absent or Pro
  MISC_FEATURE (458)..(458): Gly or Gln or Met or Ile or Ala or His or Absent or Asp or Thr
  MISC_FEATURE (459)..(459): Ala or Ser or Asn or Asp or Thr or Gly or Val or Absent
  MISC_FEATURE (460)..(460): Ala or Pro or Thr or Glu or Asn or Gly or Absent
  MISC_FEATURE (461)..(461): Val or Ile or Thr or Pro or Ala or Gln or Ser or Absent
  MISC_FEATURE (462)..(462): Thr or Pro or Gln or Asn or Gly or Absent
  MISC_FEATURE (463)..(463): Gly or Tyr or Lys or Met or Pro or Asn or Thr or Absent
  MISC_FEATURE (464)..(464): Thr or His or Glu or Asp or Pro or Arg or Absent
  MISC_FEATURE (465)..(465): Gly or Lys or Thr or Asp or Val or Arg or Absent
  MISC_FEATURE (466)..(466): Absent or Lys or Ile or Val or Asn
  MISC_FEATURE (467)..(467): Absent or Ala or Ser
  MISC_FEATURE (468)..(468): Absent or Asp or Leu
  MISC_FEATURE (469)..(469): Absent or Lys or Ser
  MISC_FEATURE (470)..(470): Absent or Leu or Pro
  MISC_FEATURE (471)..(471): Absent or Met or Arg
  MISC_FEATURE (472)..(472): Absent or His or Lys
  MISC_FEATURE (473)..(473): Absent or Met or Asn
  MISC_FEATURE (474)..(474): Absent or Ser
  MISC_FEATURE (475)..(475): Absent or Gly or Leu
  MISC_FEATURE (476)..(476): Absent or Ala or Lys
  MISC_FEATURE (477)..(477): Absent or Lys or Ala or Gln or Phe
  MISC_FEATURE (478)..(478): Lys or Arg or Absent or Ala or Val or Ile or Phe or Leu
  MISC_FEATURE (479)..(479): Lys or Gln or Arg or Absent or Ala or Glu
  MISC_FEATURE (480)..(480): Lys or Ser or Gly or Thr or Absent or Val or Glu
  MISC_FEATURE (481)..(481): Ile or Ser or Absent or Gln
  MISC_FEATURE (482)..(482): Leu or Tyr or Val or Ile or Absent or Lys or Arg
  MISC_FEATURE (483)..(483): Ala or Ser or Absent or Val
  MISC_FEATURE (484)..(484): Ala or Ser or Val or His or Absent or Ile
  MISC_FEATURE (485)..(485): Asp or Lys or Thr or Asn or Absent or Glu
  MISC_FEATURE (486)..(486): Asp or Ser or Ala or Asn or His or Absent
  MISC_FEATURE (487)..(487): Pro or Lys or Ser or Thr or Ile or Absent or Arg or Gln
  MISC_FEATURE (488)..(488): Ser or Glu or Asn or Gly or Tyr or Pro or Thr or Absent or Ile or Leu or Met
  MISC_FEATURE (489)..(489): Val or Thr or Ala or Absent or Arg or Asn
  MISC_FEATURE (490)..(490): Ile or Val or Absent or Met
  MISC_FEATURE (491)..(491): Thr or Ser or Absent or Arg
  MISC_FEATURE (492)..(492): Val or Ile or Ser or Thr or Absent or Lys or Gln
  MISC_FEATURE (493)..(493): Asp or Absent or Arg or Gln or Lys
  MISC_FEATURE (494)..(494): Gln or Glu or Arg or Met or Asp or Thr or Lys or Absent or Ala
  MISC_FEATURE (495)..(495): Val or Ile or Absent or Leu or Met
  MISC_FEATURE (496)..(496): Arg or Absent or Leu or Gln or Asp or Glu
  MISC_FEATURE (497)..(497): Pro or Absent or Asp or Glu
  MISC_FEATURE (498)..(498): Asp or Absent or Glu
  MISC_FEATURE (499)..(499): Trp or Absent or Lys
  MISC_FEATURE (501)..(501): Thr or Ala or His or Lys or Ile or Gln or Absent or Glu or Asp
  MISC_FEATURE (502)..(502): Lys or Thr or Glu or Absent or Arg
  MISC_FEATURE (503)..(503): Leu or Absent or Glu or Met
  MISC_FEATURE (504)..(504): Ala or Asn or Ile or Ser or Absent or Gln or His or Arg or Lys
  MISC_FEATURE (505)..(505): Gln or Ala or Ser or Lys or Asp or Asn or Absent or Arg
  MISC_FEATURE (506)..(506): Ala or Val or Glu or Absent or Lys or Arg
  MISC_FEATURE (507)..(507): Glu or Arg or Lys or Absent or Leu or Gln
  MISC_FEATURE (508)..(508): Ala or Ser or Thr or Val or Absent or Glu or Gly or Asn
  MISC_FEATURE (509)..(509): Ala or Arg or Lys or His or Gln or Absent or Gly or Asn or Ser or Ile
  MISC_FEATURE (510)..(510): Val or Ala or Leu or Absent or Cys or Ile or Ser or Tyr
  MISC_FEATURE (511)..(511): Ala or Met or Leu or Absent or Arg or Ser or Pro
  MISC_FEATURE (512)..(512): Arg or Absent or Ala or Ser
  MISC_FEATURE (513)..(513): Arg or Lys or Absent or Gly or Ser
  MISC_FEATURE (514)..(514): Ala or Ser or Absent or Arg or Thr
  MISC_FEATURE (515)..(515): Asn or Ser or Ala or Absent or Ile or Arg
  MISC_FEATURE (516)..(516): Arg or Thr or Asn or Ala or Absent or Leu
  MISC_FEATURE (517)..(517): Arg or Ala or Absent or Leu or Met or Ser or Val or Ile
  MISC_FEATURE (518)..(518): Val or Ile or Asn or Ser or Thr or Absent or Gln or Glu or Ala
  MISC_FEATURE (519)..(519): Ile or Ala or Absent or Thr or Gly or Val or Pro
  MISC_FEATURE (520)..(520): Met or Leu or Ile or Absent or Pro or Glu or Thr
  MISC_FEATURE (521)..(521): Arg or His or Absent or Met or Val or Ala or Leu or Thr or Lys
  MISC_FEATURE (522)..(522): Gln or Ala or Val or Ile or Asn or Thr or Absent or Ser or Glu or Asp
  MISC_FEATURE (523)..(523): Val or Thr or Ser or Ala or Absent or Gln or Tyr
  MISC_FEATURE (524)..(524): Gly or Ala or Asn or Absent or Pro or Ser or Glu
  MISC_FEATURE (525)..(525): Asp or Phe or Leu or Arg or Tyr or Absent or Val or Ser or Thr
  MISC_FEATURE (526)..(526): Arg or Val or Leu or Met or Absent or Thr or Gly
  MISC_FEATURE (527)..(527): Leu or Glu or Val or Ile or Met or Absent or Asn or Ser or Ala or Asp
  MISC_FEATURE (528)..(528): Ile or Val or Gly or Asp or Asn or Absent
  MISC_FEATURE (529)..(529): Pro or Gly or Asp or Asn or Ser or Absent or Glu or Phe or Cys
  MISC_FEATURE (530)..(530): Ile or Val or Absent or Asn or Pro or Leu or Ser
  MISC_FEATURE (531)..(531): Gly or Absent or Ser or Ile or Ala or Phe or Thr
  MISC_FEATURE (532)..(532): Ile or Tyr or Absent or Asn or Ser or Gly or Val
  MISC_FEATURE (533)..(533): Ser or Gly or Thr or Absent or Gln or Pro or Ala or Phe or Tyr
  MISC_FEATURE (534)..(534): Ser or Arg or Absent or Asn or His or Gly or Pro
  MISC_FEATURE (535)..(535): Ser or Val or Absent or Gly or Gln or Glu or Asp or Thr
  MISC_FEATURE (536)..(536): Arg or Gln or Absent or Asn or His or Ser or Pro or Thr or Asp
  MISC_FEATURE (537)..(537): Met or Thr or Ala or Absent or Asn or Ser or Arg or Glu
  MISC_FEATURE (538)..(538): Gly or Pro or Absent or Arg or Thr or Ile
  MISC_FEATURE (539)..(539): Ala or Absent or Gly or Asn or Ser or Arg or Phe
  MISC_FEATURE (540)..(540): Asp or Absent or Thr or Ser or Phe
  MISC_FEATURE (541)..(541): Absent or Leu
  MISC_FEATURE (542)..(542): Absent or Asp
  MISC_FEATURE (543)..(543): Absent or Trp
  MISC_FEATURE (544)..(544): Absent or Gly
  MISC_FEATURE (545)..(545): Absent or Tyr
  MISC_FEATURE (546)..(546): Absent or Gly
  MISC_FEATURE (547)..(547): Absent or Asp
  MISC_FEATURE (548)..(548): Absent or Arg
  MISC_FEATURE (549)..(549): Absent or Gln
  MISC_FEATURE (550)..(550): Absent or Pro
  MISC_FEATURE (551)..(551): Absent or Gln
  MISC_FEATURE (552)..(552): Absent or Val
  MISC_FEATURE (553)..(553): Absent or Leu
  MISC_FEATURE (554)..(554): Absent or Glu
  MISC_FEATURE (555)..(555): Absent or Thr
  MISC_FEATURE (556)..(556): Absent or Leu
  MISC_FEATURE (557)..(557): Absent or Asp
  MISC_FEATURE (558)..(558): Absent or Ser
  MISC_FEATURE (559)..(559): Absent or Arg
  MISC_FEATURE (560)..(560): Absent or Glu
  MISC_FEATURE (561)..(561): Absent or Ser
  MISC_FEATURE (562)..(562): Absent or Asn
  MISC_FEATURE (563)..(563): Leu or Absent or Ala or Phe or Met
  MISC_FEATURE (564)..(564): Ala or Absent or Asp or Arg or Pro
  MISC_FEATURE (565)..(565): Ala or Absent or Phe or Leu or Arg
  MISC_FEATURE (566)..(566): Ala or Absent or Ser or Gly or Leu
  MISC_FEATURE (567)..(567): Ala or Absent or Met or Arg or Val or Asn
  MISC_FEATURE (568)..(568): Glu or Absent or Ser or Arg or Leu or Met or Pro
  MISC_FEATURE (569)..(569): Ser or Absent or Val or Arg or Tyr
  MISC_FEATURE (570)..(570): Gly or Absent or Pro or Arg or Leu or Trp
  MISC_FEATURE (571)..(571): Arg or Absent or Gln or Thr or Asn or Trp or Phe
  MISC_FEATURE (572)..(572): Ile or Absent or Met or Thr or Asn or Val or Ala
  MISC_FEATURE (573)..(573): Asn or Absent or Gln or Phe or Ala or Gly or Glu or Val
  MISC_FEATURE (574)..(574): Absent or Asn or Gly or Ile or Pro
  MISC_FEATURE (575)..(575): Absent or Ser or Gln or Asp or Ala or Pro
  MISC_FEATURE (576)..(576): Absent or Val or Asp or Tyr or Phe or Ala
  MISC_FEATURE (577)..(577): Leu or Absent or Gln or Ser or Arg or Asn or Asp or Glu
  MISC_FEATURE (578)..(578): Asn or Glu or Ser or Absent or Ala or Pro or Arg or His or Asp or Cys
  MISC_FEATURE (579)..(579): Gly or Glu or Absent or Ser or Leu or Pro or Thr or Ala
  MISC_FEATURE (580)..(580): Pro or Ala or Absent or Ser or Thr or Gly or Met or Val or Phe or Glu or Gln
  MISC_FEATURE (581)..(581): Gly or Ala or Asp or Absent or Ser or Pro or Glu or Leu or Gln
  MISC_FEATURE (582)..(582): Gly or Glu or Absent or Phe or Asp or Ala
  MISC_FEATURE (583)..(583): Ser or Gly or Absent or Gln or Arg or Asp or Glu or Lys or Asn or Thr
  MISC_FEATURE (584)..(584): Ile or Gly or Absent or Thr or Ser or Ala or Glu or Val
  MISC_FEATURE (585)..(585): Ile or Asn or Ser or Absent or Thr or Ala or Gly or Cys
  MISC_FEATURE (586)..(586): Leu or Ser or Asn or Absent or Pro or Ala or Asp or Val or Cys
  MISC_FEATURE (587)..(587): Asn or Gly or Pro or Absent or Ser or Thr
  MISC_FEATURE (588)..(588): Asp or Ser or Gln or Absent or His or Ala or Thr
  MISC_FEATURE (589)..(589): Gly or Arg or His or Absent or Val or Leu or Gln or Glu
  MISC_FEATURE (590)..(590): Gln or Arg or Absent or Asn or Asp or Ile or Glu or Pro
  MISC_FEATURE (591)..(591): Asn or Arg or Absent or Ala or Ser or Pro
  MISC_FEATURE (592)..(592): Trp or Arg or Absent or Met or Phe or Ala or Val or Cys
  MISC_FEATURE (593)..(593): Pro or Absent or Gln or Ala or Glu or Gly or Ser
  MISC_FEATURE (594)..(594): Gly or Absent or Ala or Tyr or Phe or Pro or Thr or Ser
  MISC_FEATURE (595)..(595): Ala or Absent or Asp or Leu or Asn or Ser or Cys or Gln
  MISC_FEATURE (596)..(596): Ala or Absent or Asp or Thr or Val or Met or Cys or Asn or Leu
  MISC_FEATURE (597)..(597): Pro or Absent or Leu or Glu or Asp or Val or Ile or Asn or Ser
  MISC_FEATURE (598)..(598): Val or Absent or Arg or Pro or Ile or Thr or Ser or Met
  MISC_FEATURE (599)..(599): Ala or Absent or Asn or Arg or Gln or Ser or Gly or His
  MISC_FEATURE (600)..(600): Thr or Absent or Asn or Arg or Val or Ala or Leu or His or Ser or Pro
  MISC_FEATURE (601)..(601): Ser or Absent or Asp or Val or Pro or Leu or Tyr or Phe
  MISC_FEATURE (602)..(602): Arg or Absent or Thr or Gly or Tyr or Phe or Ser or Gln or Pro or any naturally occurring amino acid or His
  MISC_FEATURE (603)..(603): Arg or Absent or Thr or Asn or Ser or Ala or Asp or Gly or Gln or Pro or Val
  MISC_FEATURE (604)..(604): Arg or Absent or Ser or Asn or Thr or Pro or Gln
  MISC_FEATURE (605)..(605): Ser or Absent or Asn or Gly or Glu or Asp or Pro or Gln or His
  MISC_FEATURE (606)..(606): Ser or Absent or Val or Glu or Gly or Asp or His or Thr or Asn or Met
  MISC_FEATURE (607)..(607): Arg or Absent or Ala or Val or Asn or Ser or Gly or Asp or Ile or Trp
  MISC_FEATURE (608)..(608): Pro or Absent or Ala or Asn or Ile or Gln or Ser or Gly
  MISC_FEATURE (609)..(609): Ser or Absent or Gly or Arg or Thr or Ala or Pro or Val
  MISC_FEATURE (610)..(610): Arg or Absent or Thr or Ser or Val or Pro or Gly or Glu
  MISC_FEATURE (611)..(611): Gly or Absent or Pro or Ser or Arg or Ala or Ile or Glu or Asp or Thr
  MISC_FEATURE (612)..(612): Ala or His or Pro or Arg or Asn or Phe or Gly or Ser or Absent or Leu
  MISC_FEATURE (613)..(613): Asn or His or Ser or Ala or Asp or Thr or Absent or Gln
  MISC_FEATURE (614)..(614): Asp or Pro or Ser or Thr or Glu or Asn or Absent or Ala
  MISC_FEATURE (615)..(615): Gly or Ala or Arg or Ser or Asp or Asn or Absent or Pro
  MISC_FEATURE (616)..(616): Val or Asn or Pro or Arg or Ser or Thr or Leu or Absent
  MISC_FEATURE (617)..(617): His or Gly or Ala or Thr or Ser or Arg or Phe or Absent
  MISC_FEATURE (618)..(618): Glu or Asn or Arg or Absent or Pro or Ala or Leu
  MISC_FEATURE (619)..(619): Leu or Thr or Gln or Ser or Absent or Gly or Pro or Ile
  MISC_FEATURE (620)..(620): Ala or Gly or Ser or Asn or Absent or Arg
  MISC_FEATURE (621)..(621): Arg or Thr or His or Ser or Ala or Gly or Asn or Absent or Lys
  MISC_FEATURE (622)..(622): Leu or Ile or Val or Glu or Phe or Tyr or Ala or Ser or Absent or Arg
  MISC_FEATURE (623)..(623): Met or Val or Gln or Gly or Ala or Arg or Ser or Absent or His or Phe
  MISC_FEATURE (624)..(624): Arg or Gly or Gln or Ser or Val or Absent
  MISC_FEATURE (625)..(625): Met or Ser or Gln or Asn or Ala or Pro or Arg or Absent or Asp or Glu
  MISC_FEATURE (626)..(626): Gly or Pro or Ala or Asn or Ser or Glu or Absent or Asp
  MISC_FEATURE (627)..(627): Asn or Gly or Ala or Ser or Pro or Absent or Asp or Glu or Gln
  MISC_FEATURE (628)..(628): Gly or Absent or Pro or Arg or Met or Thr or Phe or Val or Ile
  MISC_FEATURE (629)..(629): Absent or Pro or Ala or Tyr or Thr or Leu or Ile or Met or Asp
  MISC_FEATURE (630)..(630): Glu or Gln or Pro or Ala or Asn or Asp or Absent or Leu or Val or Tyr or Phe or Met
  MISC_FEATURE (631)..(631): Asp or Gly or Glu or Thr or Absent or Asn
  MISC_FEATURE (632)..(632): Met or Leu or Pro or Val or Phe or Absent or Ile
  MISC_FEATURE (634)..(634): Glu or Thr or Gln or Lys or Asp or Absent or Asn
  MISC_FEATURE (635)..(635): Ala or Leu or Ile or Arg or Glu or Gln or Met or Absent
  MISC_FEATURE (637)..(637): Ile or Leu or Ala or Val or Met or Absent
  MISC_FEATURE (638)..(638): Met or Phe or Ser or Glu or Arg or Asp or Absent
  MISC_FEATURE (642)..(642): Arg or Ala or Absent or Trp
  MISC_FEATURE (643)..(643): Leu or Pro or Absent or Arg
  MISC_FEATURE (645)..(645): Leu or Thr or Met or Ile or Absent or Val
  MISC_FEATURE (646)..(646): Leu or Ile or Ser or Gln or Glu or Ala or Absent
  MISC_FEATURE (647)..(647): Glu or Ser or Asp or Ala or Absent or Gln
  MISC_FEATURE (648)..(648): His or Pro or Ser or Glu or Gln or Absent or Asp
  MISC_FEATURE (649)..(649): Glu or Thr or Gln or Absent or Asp or Asn or Pro
  MISC_FEATURE (650)..(650): Glu or Pro or Absent or Asn or Gly
  MISC_FEATURE (651)..(651): Gln or His or Ser or Ala or Arg or Asn or Lys or Absent or Thr or Ile
  MISC_FEATURE (652)..(652): Gln or Pro or Glu or Lys or Ala or Arg or Absent or His or Leu or Ile
  MISC_FEATURE (653)..(653): Arg or Glu or Thr or Lys or Absent or His or Met or Val or Gly
  MISC_FEATURE (654)..(654): Lys or Arg or Asn or Ser or Ala or Absent
  MISC_FEATURE (655)..(655): Gln or Glu or Leu or Arg or Ala or Ile or Lys or Asp or Absent or Phe or Ser or Pro or Asn or Thr
  MISC_FEATURE (656)..(656): Ala or Ser or Asn or Arg or Glu or Absent or Leu or Val
  MISC_FEATURE (657)..(657): Glu or Gly or Arg or Lys or Pro or Absent or Asp or Ser or Tyr or Cys
  MISC_FEATURE (658)..(658): Glu or Gln or Gly or Absent or Asn or Asp
  MISC_FEATURE (659)..(659): Glu or Arg or Ser or Gln or Asn or Pro or Absent or Thr or Ala or Leu or Asp
  MISC_FEATURE (660)..(660): Lys or Asp or Glu or Val or Absent or Ser or Ala or Arg or Ile or Thr or Tyr or Phe
  MISC_FEATURE (661)..(661): Lys or Ser or Asp or Absent or Leu or Thr or Phe or Met
  MISC_FEATURE (662)..(662): Asn or Lys or Gln or Absent or Arg or Glu or Ser or Thr or Pro
  MISC_FEATURE (663)..(663): Lys or Glu or Ser or Absent or Pro or Ala or Val or Phe
  MISC_FEATURE (664)..(664): Absent or Gly or Val or Arg or Glu or Asp or Ile or Thr
  MISC_FEATURE (665)..(665): Absent or Ala or Pro or Gln or Arg or Glu
  MISC_FEATURE (666)..(666): Absent or Ser or Asn or Tyr or Pro
  MISC_FEATURE (667)..(667): Absent or Lys or Arg or Val or Glu or Pro or Ser or Thr
  MISC_FEATURE (668)..(668): Absent or Leu or Lys or Pro or Thr or Glu or Ser
  MISC_FEATURE (669)..(669): Absent or Leu or Lys or Arg or Ala or Asp or Glu or Pro
  MISC_FEATURE (670)..(670): Absent or Ser or Asp or Arg or Gly or Asn or Glu
  MISC_FEATURE (671)..(671): Absent or Lys or Gly or Glu or Leu or His or Arg
  MISC_FEATURE (672)..(672): Absent or Phe or Lys or Ala or Ser or Tyr or Gln
  MISC_FEATURE (673)..(673): Absent or Ser or Glu or Leu or Tyr or Val or Ala or Pro
  MISC_FEATURE (674)..(674): Absent or Asn or Ala or Glu or Val or Leu
  MISC_FEATURE (675)..(675): Absent or Val or Lys or Asn or Ser
  MISC_FEATURE (676)..(676): Absent or Arg or Lys or Ser
  MISC_FEATURE (677)..(677): Absent or Ala or Phe or Pro
  MISC_FEATURE (678)..(678): Ala or Absent or Arg or Lys or Glu or Ser or Pro
  MISC_FEATURE (679)..(679): Ala or Absent or Glu or Lys or Ser or Arg
  MISC_FEATURE (680)..(680): Ala or Asn or Absent or Leu or Ser or Met or Glu or Val
  MISC_FEATURE (681)..(681): Ala or Glu or Ser or Absent or Lys or Leu or Thr
  MISC_FEATURE (682)..(682): Ala or Arg or Ser or Absent or Lys or Asp or Pro
  MISC_FEATURE (683)..(683): Ala or Absent or Lys or Gly or Ile or Gln or Phe
  MISC_FEATURE (684)..(684): Ala or Ser or Absent or Thr or Val or Leu
  MISC_FEATURE (685)..(685): Ser or Ala or Absent or Lys or Gly or Asn or Glu or Pro
  MISC_FEATURE (686)..(686): Ala or Lys or Absent or Leu or Thr or Pro
  MISC_FEATURE (687)..(687): Thr or Glu or Gly or Absent or Gln or Asp or Tyr or Arg or Ala or Pro or Ser
  MISC_FEATURE (688)..(688): Gln or Asn or Leu or Absent or Ser or Ala or Thr or Pro
  MISC_FEATURE (689)..(689): Gly or Absent or Arg or Gln or Asn or Pro or Ser or Leu
  MISC_FEATURE (690)..(690): Ser or Glu or Absent or Ile or Asn or Pro
  MISC_FEATURE (691)..(691): Met or Gly or Absent or Pro or Ala or Ser or Ile
  MISC_FEATURE (692)..(692): Ala or Glu or Asp or Absent or Ser or Pro
  MISC_FEATURE (693)..(693): Thr or Pro or Phe or Absent or Gly or Asn or Ser or Ala
  MISC_FEATURE (694)..(694): Ser or Lys or Absent or Phe or Val
  MISC_FEATURE (695)..(695): Ser or Asp or Asn or Absent or His or Ala or Pro
  MISC_FEATURE (696)..(696): Arg or Ala or Thr or Absent or Pro or Leu or Glu
  MISC_FEATURE (697)..(697): Leu or Gln or Phe or Absent or Thr or Glu or Pro
  MISC_FEATURE (698)..(698): Ser or Gly or Absent or Asp or Glu
  MISC_FEATURE (699)..(699): Thr or Ala or Arg or Absent or Ile or Ser or Pro
  MISC_FEATURE (700)..(700): Ser or Pro or Thr or Absent or Asp or Trp
  MISC_FEATURE (701)..(701): Asn or Ser or Arg or Absent or Gly or Asp or His
  MISC_FEATURE (702)..(702): Asp or Ser or Absent or Leu or Gln
  MISC_FEATURE (703)..(703): Leu or Ser or Asn or Absent or Asp or Ala or Arg or His
  MISC_FEATURE (704)..(704): Ser or Gln or Absent or Glu or Asn or Leu
  MISC_FEATURE (705)..(705): Ala or Gly or Absent or Ser or Pro
  MISC_FEATURE (706)..(706): Gly or Ala or Absent or Lys or Arg
  MISC_FEATURE (707)..(707): Gly or Pro or Thr or Absent or Val or Gln
  MISC_FEATURE (708)..(708): Ser or Gln or Absent or Gly or Thr
  MISC_FEATURE (709)..(709): Ala or Ser or Thr or Absent
  MISC_FEATURE (710)..(710): Ala or Ser or Leu or Absent or His
  MISC_FEATURE (711)..(711): Asn or Ser or Absent or Gly or Ala or Pro
  MISC_FEATURE (712)..(712): Arg or Ala or Ser or Absent or Gly or Val
  MISC_FEATURE (713)..(713): Phe or Ala or Ser or Absent or Gly
  MISC_FEATURE (714)..(714): Pro or Absent or Gly or Ala or Ile or Leu or Tyr or Phe
  MISC_FEATURE (715)..(715): Val or Pro or Ala or Absent or Lys or Asn or Ile or Ser
  MISC_FEATURE (716)..(716): Gly or Absent or Ser or Cys
  MISC_FEATURE (717)..(717): Ala or Absent or Lys or Glu
  MISC_FEATURE (718)..(718): Ala or Pro or Leu or Absent or Glu or Ile or Val
  MISC_FEATURE (719)..(719): Gln or Ser or Val or Absent or Asp or Arg or Ala
  MISC_FEATURE (720)..(720): Ser or Ala or Absent or Asp or Met or Thr or Val
  MISC_FEATURE (721)..(721): Val or Ser or Thr or Absent or Arg or Pro or Leu or Met
  MISC_FEATURE (722)..(722): Leu or Ser or Gln or Absent or Ala or Pro or Thr
  MISC_FEATURE (723)..(723): Glu or Asn or Thr or Absent or Val or Gly
  MISC_FEATURE (724)..(724): Glu or Asp or Ser or Absent or Gly or Lys or Gln or Arg or His
  MISC_FEATURE (725)..(725): Ser or Pro or Ala or Absent or Asn or Gly or Gln
  MISC_FEATURE (726)..(726): Glu or Ser or Absent or Val or Lys or Ala or Met or Gln or Pro
  MISC_FEATURE (727)..(727): Gly or Ala or Absent or Val or Met or Pro or Ser
  MISC_FEATURE (728)..(728): Ser or Absent or Phe or Val or Gly
  MISC_FEATURE (729)..(729): Ser or Leu or Thr or Absent or Asn or Asp or Glu or Pro or Gly
  MISC_FEATURE (730)..(730): Ser or Ala or Absent or Pro or Arg or Asn or Glu or Val or Met
  MISC_FEATURE (731)..(731): Asn or Pro or Absent or Met or Ser or Val or Thr or Asp
  MISC_FEATURE (732)..(732): Ala or Ser or Absent or Asn or Glu or Thr or Phe
  MISC_FEATURE (733)..(733): Ala or Gly or Absent or Glu or Pro or His or Thr or Ser
  MISC_FEATURE (734)..(734): Arg or Gln or Gly or Absent or Pro or Ser or Ala or Asn or Tyr
  MISC_FEATURE (735)..(735): Ser or His or Absent or Thr or Pro or Gln or Ile or Tyr or Met
  MISC_FEATURE (736)..(736): Ser or Absent or Gly or His or Asn or Ala or Thr
  MISC_FEATURE (737)..(737): Pro or Arg or Ala or Absent or Asn or His or Gly or Gln
  MISC_FEATURE (738)..(738): Leu or Ser or Ala or Absent or Val or Thr or Asn
  MISC_FEATURE (739)..(739): Ala or Pro or Absent or Val or Asp or Ser
  MISC_FEATURE (740)..(740): Ala or Thr or Ser or Absent or Leu or Asn
  MISC_FEATURE (741)..(741): Asp or Pro or Absent or Ile or Thr or Ser or Val or Met or Leu or Tyr or Phe
  MISC_FEATURE (742)..(742): Ala or Asp or Ile or Absent or Asn or Glu or Ser or Pro
  MISC_FEATURE (743)..(743): Pro or Ser or Absent or Thr or Ala or Leu or Val
  MISC_FEATURE (744)..(744): Thr or Asn or Ser or Absent or Gly or Ala or Gln or Tyr or Phe
  MISC_FEATURE (745)..(745): Val or Asn or Ile or Absent or Ser or Pro or Asp
  MISC_FEATURE (746)..(746): Pro or Arg or Ser or Absent or Ala or Met or Leu
  MISC_FEATURE (747)..(747): Arg or Thr or Pro or Absent or Lys or Gly or Leu or Val or Ile or Phe
  MISC_FEATURE (748)..(748): Leu or Pro or Absent or Asp or Glu or Ser or Arg
  MISC_FEATURE (749)..(749): Pro or Ala or Absent or Asp or Val or Gly or Arg
  MISC_FEATURE (750)..(750): Pro or Thr or Absent or Asp or Asn or Ser
  MISC_FEATURE (751)..(751): Val or Phe or Thr or Absent or Gln or Lys or Ser or His or Gly or Cys
  MISC_FEATURE (752)..(752): Ser or His or Absent or Lys or Ile or Arg or Asn
  MISC_FEATURE (753)..(753): Asn or Thr or Absent or His or Phe or Val or Met or Ile
  MISC_FEATURE (754)..(754): Val or Met or Gln or Absent or Leu or Ile or Pro or Ser or Ala
  MISC_FEATURE (755)..(755): Asp or Asn or Pro or Absent or Glu or Lys or Ser or Gly
  MISC_FEATURE (756)..(756): Pro or Ala or Leu or Absent or Thr or Asp or Val or Arg or Gly
  MISC_FEATURE (757)..(757): Ala or Asn or Absent or Ser or Val
  MISC_FEATURE (758)..(758): Ala or Leu or Lys or Absent or Arg or Asn or Glu or Met
  MISC_FEATURE (759)..(759): Leu or Thr or Absent or Ala or Ile or Gln or Cys or Gly or Arg
  MISC_FEATURE (760)..(760): Gly or Absent or Gln or Asn or Tyr or Ser or Ala
  MISC_FEATURE (761)..(761): Leu or Absent or Ile or Glu or Cys or Pro or Asn or Val or Ala
  MISC_FEATURE (762)..(762): Ser or Thr or Absent or Gln or Leu or Glu or Asp
  MISC_FEATURE (763)..(763): Gln or Ser or Val or Absent or Arg or Lys or Pro or Asn or His
  MISC_FEATURE (764)..(764): Thr or Gly or Pro or Absent or Asp or Leu or Tyr or Ser
  MISC_FEATURE (765)..(765): Thr or Absent or Glu or Gln or Val or Tyr or Pro or Asn or Ser
  MISC_FEATURE (766)..(766): Met or Ala or His or Absent or Ser or Gln or Asp or Pro or Leu
  MISC_FEATURE (767)..(767): Asp or Thr or Ser or Absent or Phe or Ile or Glu
  MISC_FEATURE (768)..(768): Glu or Ala or Ser or Absent or Gly or Thr
  MISC_FEATURE (769)..(769): Leu or Phe or Gly or Absent or Asn or Ser or Asp or Gln or Trp
  MISC_FEATURE (770)..(770): Arg or Leu or Absent or Met or Ala or Glu or Ser or Asp
  MISC_FEATURE (771)..(771): Glu or Asn or Ser or Absent or Gly or Leu or Pro or Val or Met
  MISC_FEATURE (772)..(772): Leu or Ala or Absent or Pro or Glu or Asp or Asn or Met or Ile
  MISC_FEATURE (773)..(773): Ile or Ser or Thr or Absent or Pro or Gly or Ala or His
  MISC_FEATURE (774)..(774): Asp or Absent or Thr or Gln or Ile or Leu or Tyr or Pro
  MISC_FEATURE (775)..(775): Ala or Ser or Absent or Asp or Pro or Leu or Asn
  MISC_FEATURE (776)..(776): Asp or Val or Absent or Leu or His or Asn or Gln or Cys or Gly
  MISC_FEATURE (777)..(777): Pro or Absent or Glu or Gly or Ser or Thr
  MISC_FEATURE (778)..(778): Met or Ser or Ala or Absent or Asp or Lys or Gly or Arg
  MISC_FEATURE (779)..(779): Leu or Ser or Ala or Absent or Gln or Gly or Glu or His or Arg
  MISC_FEATURE (780)..(780): Pro or Gly or Absent or Ser or Gln or His or Ala or Glu
  MISC_FEATURE (781)..(781): Ser or Ile or Absent or Arg or His or Val or Met
  MISC_FEATURE (782)..(782): Ser or Thr or Absent or His or Lys or Val
  MISC_FEATURE (783)..(783): Ser or Thr or Absent or Arg or Asn or Pro or Glu or Lys
  MISC_FEATURE (784)..(784): Asp or Pro or Leu or Absent or Ser or Met or Glu or His
  MISC_FEATURE (785)..(785): Ser or Ala or Absent or His or Leu or Asp or Glu
  MISC_FEATURE (786)..(786): Ala or Val or Ser or Absent or Leu or Pro or Tyr or Gly
  MISC_FEATURE (787)..(787): Pro or Absent or Arg or Gln or Glu
  MISC_FEATURE (788)..(788): Ser or Ile or Gly or Absent or Asn or His or Met or Trp or Cys
  MISC_FEATURE (789)..(789): Pro or Ala or Absent or Leu or Val or Gly or Ser
  MISC_FEATURE (790)..(790): Met or Ala or Ser or Absent or Arg or Glu or Val or Thr or Ile
  MISC_FEATURE (791)..(791): Pro or Val or Gly or Absent or Asn or Ser or Glu or Thr or Asp
  MISC_FEATURE (792)..(792): Val or Thr or Gln or Absent or Ala or Asn or Gly or Arg or His
  MISC_FEATURE (793)..(793): Glu or Leu or Asn or Absent or Ser or Gly or Trp
  MISC_FEATURE (794)..(794): Ser or Thr or Absent or Val
  MISC_FEATURE (795)..(795): Gly or Absent or Ser or Arg or Glu
  MISC_FEATURE (796)..(796): Gly or Asp or Glu or Absent or Ala or Asn or Phe or Val
  MISC_FEATURE (797)..(797): Leu or Ala or Absent or Ser or Met
  MISC_FEATURE (798)..(798): Ala or Val or Asp or Absent or Ser or Pro or Glu
  MISC_FEATURE (799)..(799): Arg or Pro or Leu or Absent or Phe or Val or Ala
  MISC_FEATURE (800)..(800): Pro or Thr or Leu or Absent or Ala or Val or Gly
  MISC_FEATURE (801)..(801): Leu or Thr or Gly or Absent or Glu or Val or Asn or Ile
  MISC_FEATURE (802)..(802): Absent or Ser
  MISC_FEATURE (803)..(803): Absent or Tyr or Ala or Met or any naturally occurring amino acid
  MISC_FEATURE (804)..(804): Absent or Glu or Phe or Ser
  MISC_FEATURE (805)..(805): Absent or Asn or Gly or Glu
  MISC_FEATURE (806)..(806): Absent or Ser
  MISC_FEATURE (807)..(807): Absent or Leu
  MISC_FEATURE (808)..(808): Absent or Arg
  MISC_FEATURE (809)..(809): Absent or Gln
  MISC_FEATURE (810)..(810): Absent or Pro
  MISC_FEATURE (811)..(811): Absent or Gly
  MISC_FEATURE (812)..(812): Absent or Gln
  MISC_FEATURE (813)..(813): Absent or Asp
  MISC_FEATURE (814)..(814): Absent or Ser
  MISC_FEATURE (815)..(815): Absent or Leu
  MISC_FEATURE (816)..(816): Absent or Ala
  MISC_FEATURE (817)..(817): Absent or Pro
  MISC_FEATURE (818)..(818): Absent or Gly
  MISC_FEATURE (819)..(819): Absent or Ser
  MISC_FEATURE (820)..(820): Absent or Ile
  MISC_FEATURE (821)..(821): Absent or Glu
  MISC_FEATURE (822)..(822): Absent or Pro or Ser
  MISC_FEATURE (823)..(823): Absent or Ser or Ile or Gly
  MISC_FEATURE (824)..(824): Absent or Pro or Gly or Leu
  MISC_FEATURE (825)..(825): Absent or Ser
  MISC_FEATURE (826)..(826): Absent or Gly or Ala
  MISC_FEATURE (827)..(827): Absent or Ser
  MISC_FEATURE (828)..(828): Absent or Gly
  MISC_FEATURE (829)..(829): Absent or Val
  MISC_FEATURE (830)..(830): Absent or Asn
  MISC_FEATURE (831)..(831): Absent or Leu
  MISC_FEATURE (832)..(832): Absent or Ser
  MISC_FEATURE (833)..(833): Absent or Gln
  MISC_FEATURE (834)..(834): Arg or Gly or Absent or Thr
  MISC_FEATURE (835)..(835): Leu or Pro or Absent or Asp
  MISC_FEATURE (836)..(836): Val or Ser or Absent or Thr or Gln or Tyr
  MISC_FEATURE (837)..(837): Ala or Pro or Absent or Ser or Val or Thr
  MISC_FEATURE (838)..(838): Ala or Glu or Pro or Absent or His or Gly or Ser or Arg
  MISC_FEATURE (839)..(839): Pro or Ala or Ile or Absent or Gln or Asn or Glu or Arg or Ser
  MISC_FEATURE (840)..(840): Glu or Pro or Thr or Absent or Gly or Tyr or Asp
  MISC_FEATURE (841)..(841): Ser or Gln or Absent or Thr or Lys or Met or Ala or Ile
  MISC_FEATURE (842)..(842): Val or Ala or Absent or Pro or Ser or Thr or Met
  MISC_FEATURE (843)..(843): Pro or Ser or Asp or Absent or Gly or Val or Ala
  MISC_FEATURE (844)..(844): Val or Ser or Ala or Absent or Glu or Asp
  MISC_FEATURE (845)..(845): Pro or Val or Absent or Thr or Leu or Ala or Glu or Gly or Ser
  MISC_FEATURE (846)..(846): Gln or Ser or Val or Absent or Glu or Ala or Asn or Gly
  MISC_FEATURE (847)..(847): Pro or Ser or Gly or Absent or Ala or Thr
  MISC_FEATURE (848)..(848): Ile or Ser or Leu or Absent or Met or Phe or Val or Glu
  MISC_FEATURE (849)..(849): Ala or Ser or Pro or Absent or Phe or His or Arg or Thr or Gln or Leu
  MISC_FEATURE (850)..(850): Gly or Val or His or Absent or Asn or Ala or Ser or Pro or Gln
  MISC_FEATURE (851)..(851): Leu or Absent or Phe or Arg
  MISC_FEATURE (852)..(852): Gly or Thr or Ser or Absent or Lys or Arg or Glu or Pro
  MISC_FEATURE (853)..(853): Ser or Gly or Ala or Absent or Lys or Pro or Phe
  MISC_FEATURE (854)..(854): Val or Asp or Absent or Leu or Pro or Thr or Ala
  MISC_FEATURE (855)..(855): Leu or Met or Absent or Ala or Pro or Asp or Glu
  MISC_FEATURE (856)..(856): Ala or Pro or Absent or Asp or Asn or Glu
  MISC_FEATURE (857)..(857): Glu or Arg or Thr or Absent or Ser or Met or Val or Ala
  MISC_FEATURE (858)..(858): Gln or Pro or Leu or Absent or Ile or Trp or Glu
  MISC_FEATURE (859)..(859): His or Ala or Ile or Absent or Thr or Asp or Gly or Val
  MISC_FEATURE (860)..(860): Asp or Ser or Pro or Absent
  MISC_FEATURE (861)..(861): Pro or Leu or Asp or Absent or Glu or Thr or Ser or Phe or Tyr
  MISC_FEATURE (862)..(862): Ser or Ala or Absent or Glu or Pro or Asp or Thr or Gln
  MISC_FEATURE (863)..(863): Ile or Ser or Pro or Absent or Gln or Lys or Asn or Met
  MISC_FEATURE (864)..(864): Ser or Gly or Absent or Lys or Val or Ala
  MISC_FEATURE (865)..(865): Ser or Thr or Asp or Absent or Glu or Gly or Pro or Ala
  MISC_FEATURE (866)..(866): Gln or Thr or Arg or Absent or Lys or Asp or Glu or Tyr or Leu or Gly or Ser
  MISC_FEATURE (867)..(867): His or Pro or Ala or Absent or Asp or Ser or Lys or Val
  MISC_FEATURE (868)..(868): Gly or Ser or Ala or Absent or Ile or Phe
  MISC_FEATURE (869)..(869): Tyr or Ser or Thr or Absent or Gly or Val or Arg
  MISC_FEATURE (870)..(870): Pro or Gly or Ala or Absent or Ser
  MISC_FEATURE (871)..(871): Ser or Phe or Absent or Gln or Val or Glu
  MISC_FEATURE (872)..(872): Pro or Ser or Thr or Absent or Phe or Asn
  MISC_FEATURE (873)..(873): Pro or Leu or Ser or Absent or Ile or Thr or Phe or Val
  MISC_FEATURE (874)..(874): Pro or Gly or Val or Absent or Glu or Trp
  MISC_FEATURE (875)..(875): Glu or Pro or Val or Absent or Asn or Ser or His or Leu
  MISC_FEATURE (876)..(876): Val or Asp or Leu or Absent or Met or Gly or Gln
  MISC_FEATURE (877)..(877): Ser or Pro or Absent or Glu or Asn or Asp or Met
  MISC_FEATURE (878)..(878): Gly or Ser or Glu or Absent or Arg or Asp or Gln or Met
  MISC_FEATURE (879)..(879): Ser or Leu or Gly or Absent or Ala or Thr or Met or Phe or Tyr
  MISC_FEATURE (880)..(880): Ala or Asp or Absent or His or Ser
  MISC_FEATURE (881)..(881): Lys or Gly or Pro or Absent or Glu or Met
  MISC_FEATURE (882)..(882): His or Gly or Absent or Thr or Arg or Ala
  MISC_FEATURE (883)..(883): Ala or Thr or Absent or Ser or Val or Leu
  MISC_FEATURE (884)..(884): Thr or Val or Ala or Absent or Ser or Glu
  MISC_FEATURE (885)..(885): Ser or Tyr or Leu or Absent or Lys or Asn or Val or Met
  MISC_FEATURE (886)..(886): Phe or Gly or Pro or Absent or Ala or Glu
  MISC_FEATURE (887)..(887): Ser or Thr or Asn or Absent or Pro or Glu or Asp
  MISC_FEATURE (888)..(888): Thr or Leu or Ser or Absent or Val or Ala or Gly
  MISC_FEATURE (889)..(889): Thr or Pro or Asp or Absent or Ala or Gln or Gly or Phe or His or Arg
  MISC_FEATURE (890)..(890): Thr or Ser or Absent or Val or Ala
  MISC_FEATURE (891)..(891): Thr or Ser or Ala or Absent or Gln or Arg or His
  MISC_FEATURE (892)..(892): Thr or Pro or Absent or Ser or Gly
  MISC_FEATURE (893)..(893): Pro or Glu or Absent or Ala or Ser or Val or Thr or Arg
  MISC_FEATURE (894)..(894): Pro or Ser or Absent or Lys or Ala or Cys or Thr
  MISC_FEATURE (895)..(895): Leu or Ile or Ser or Absent or Thr or Ala or Gln or His
  MISC_FEATURE (896)..(896): Asp or Gly or Thr or Absent or Glu or Val or Asn or Ala or Pro or Ser
  MISC_FEATURE (897)..(897): Ala or Gln or Leu or Absent or Pro or Lys or Ser or Thr
  MISC_FEATURE (898)..(898): His or Ser or Absent or Thr or Glu or Asp or Gln or Gly
  MISC_FEATURE (899)..(899): Ala or Pro or Asp or Absent or Thr or Leu or Val or Gly
  MISC_FEATURE (900)..(900): Ser or Pro or Absent or Gln or Ala or Thr or Val
  MISC_FEATURE (901)..(901): Ala or Leu or Ser or Absent or Pro or Glu or Trp
  MISC_FEATURE (902)..(902): Pro or Glu or Ala or Absent or His or Asn or Gln or Leu
  MISC_FEATURE (903)..(903): Ala or Pro or Absent or Asp or Ser or Gly
  MISC_FEATURE (904)..(904): Val or Ser or Thr or Absent or Ala or Glu or Pro
  MISC_FEATURE (905)..(905): Pro or Ser or Absent or Gly or Asp
  MISC_FEATURE (906)..(906): Gly or Lys or Arg or Absent or Leu or Asn or Ala or Ile
  MISC_FEATURE (907)..(907): Ser or Val or Absent or Ala or Glu or Pro
  MISC_FEATURE (908)..(908): Ser or Gly or Absent or Asp or Pro
  MISC_FEATURE (909)..(909): Gly or Asn or Met or Absent or Ser or Asp or Thr
  MISC_FEATURE (910)..(910): Phe or Asp or His or Absent or Thr or Gln or Ser
  MISC_FEATURE (911)..(911): Ala or Arg or Absent or Met or Val or Ser
  MISC_FEATURE (912)..(912): Ser or Gly or Absent or Thr or Asn
  MISC_FEATURE (913)..(913): Ala or Asn or His or Absent or Leu or Gly
  MISC_FEATURE (914)..(914): Ala or Ser or Absent or Lys or Leu or Val or Glu
  MISC_FEATURE (915)..(915): Ala or Ser or Cys or Absent or Pro or Glu
  MISC_FEATURE (916)..(916): Val or Leu or Ile or Absent or Thr or Ser or Lys
  MISC_FEATURE (917)..(917): Pro or Thr or Absent or Leu or Ser or Gly
  MISC_FEATURE (918)..(918): Pro or Ser or Glu or Absent or Gly
  MISC_FEATURE (919)..(919): Ser or Asp or Val or Absent or Thr or Phe
  MISC_FEATURE (920)..(920): Arg or Ser or Thr or Absent or Leu or Val or Asn
  MISC_FEATURE (921)..(921): Ile or Ser or Glu or Absent or Asn
  MISC_FEATURE (922)..(922): Met or Pro or Absent or Ile or Glu or Asp
  MISC_FEATURE (923)..(923): Asn or Thr or Glu or Absent or Asp or Ser or Lys
  MISC_FEATURE (924)..(924): Pro or Asp or Ala or Absent or Asn or Val
  MISC_FEATURE (925)..(925): Asn or Asp or Glu or Absent or Gln or Leu
  MISC_FEATURE (926)..(926): Asn or Gly or Absent or Val
  MISC_FEATURE (927)..(927): Pro or Thr or Asn or Absent or Gly
  MISC_FEATURE (928)..(928): Phe or Ala or Gly or Absent or Asp
  MISC_FEATURE (929)..(929): Arg or Pro or Absent or Glu or Ser
  MISC_FEATURE (930)..(930): Arg or Gly or Absent or Ile or Gln or Phe
  MISC_FEATURE (931)..(931): Ser or Absent or Tyr or Lys or Glu
  MISC_FEATURE (932)..(932): Met or Absent or Ala or Pro or Asp or Cys or Glu
  MISC_FEATURE (933)..(933): Gly or Absent or Arg or Ala or Thr or Ser or Gln
  MISC_FEATURE (934)..(934): Glu or Absent or Leu or Pro or Val or Met
  MISC_FEATURE (935)..(935): Gln or Absent or Asp or Arg or Gly or Asn or Met
  MISC_FEATURE (936)..(936): His or Absent or Thr or Ile or Lys or Leu
  MISC_FEATURE (937)..(937): Absent or Asp or Glu or Ala
  MISC_FEATURE (938)..(938): Absent or Glu or Ala or Val or Ile or Met
  MISC_FEATURE (939)..(939): Absent or Glu or Val or His or Ala
  MISC_FEATURE (940)..(940): Absent or Arg or Gln or Met or Thr or Leu
  MISC_FEATURE (941)..(941): Absent or Asn or Ser or Arg
  MISC_FEATURE (942)..(942): Absent or Gly or Ser or Leu
  MISC_FEATURE (943)..(943): Absent or His or Ala or Met
  MISC_FEATURE (944)..(944): Absent or Ser or Glu or Asp
  MISC_FEATURE (945)..(945): Absent or Asp or Val or Ala
  MISC_FEATURE (946)..(946): Absent or Leu or Thr or Gln
  MISC_FEATURE (947)..(947): Absent or Asp or Pro or Ala
  MISC_FEATURE (948)..(948): Absent or Ser or Gln or Arg
  MISC_FEATURE (949)..(949): Absent or Lys or Ser or Arg or Val
  MISC_FEATURE (950)..(950): Absent or Gln or Ser or Asn or Arg
  MISC_FEATURE (951)..(951): Absent or Leu or Ser or His
  MISC_FEATURE (952)..(952): Absent or Gly or Glu
  MISC_FEATURE (953)..(953): Absent or Asp or Thr or Gly
  MISC_FEATURE (954)..(954): Absent or Val or Ala or Thr or Asn
  MISC_FEATURE (955)..(955): Absent or Ser or His
  MISC_FEATURE (956)..(956): Absent or Met or Ser
  MISC_FEATURE (957)..(957): Absent or Ile or Gly
  MISC_FEATURE (958)..(958): Absent or Asp or Pro
  MISC_FEATURE (959)..(959): Absent or Gly or Leu
  MISC_FEATURE (960)..(960): Absent or Tyr or Pro
  MISC_FEATURE (961)..(961): Absent or His or Gln
  MISC_FEATURE (962)..(962): Absent or His or Ala
  MISC_FEATURE (963)..(963): Absent or His or Thr
  MISC_FEATURE (964)..(964): Absent or Ala or His
  MISC_FEATURE (965)..(965): Absent or Thr or Phe
  MISC_FEATURE (966)..(966): Absent or Gln or Thr
  MISC_FEATURE (967)..(967): Absent or Asp
  MISC_FEATURE (968)..(968): Absent or Ala
  MISC_FEATURE (969)..(969): Absent or Gln
  MISC_FEATURE (970)..(970): Absent or Ala
  MISC_FEATURE (971)..(971): Absent or Arg
  MISC_FEATURE (972)..(972): Absent or Val
  MISC_FEATURE (973)..(973): Absent or Arg
  MISC_FEATURE (974)..(974): Absent or Gln
  MISC_FEATURE (975)..(975): Absent or Gly
  MISC_FEATURE (976)..(976): Absent or Ile
  MISC_FEATURE (977)..(977): Absent or Ser
  MISC_FEATURE (978)..(978): Absent or Arg
  MISC_FEATURE (979)..(979): Absent or Ser
  MISC_FEATURE (980)..(980): Absent or Gly
  MISC_FEATURE (981)..(981): Absent or Pro
  MISC_FEATURE (982)..(982): Absent or Leu
  MISC_FEATURE (983)..(983): Absent or Pro
  MISC_FEATURE (984)..(984): Absent or Arg
  MISC_FEATURE (985)..(985): Absent or Pro
  MISC_FEATURE (986)..(986): Absent or Thr
  MISC_FEATURE (987)..(987): Absent or Tyr
  MISC_FEATURE (988)..(988): Absent or Ile
  MISC_FEATURE (989)..(989): Absent or Gly
  MISC_FEATURE (990)..(990): Absent or Gln
XXXXXXXXXXXXXXXXXXXXXXXXXXXXXXXXXXXXXXXXXXXXXXXXXXXXXXXXXXXXXXXXXXXXXXXXXXXXXXXXXXXXXXXXXXXXXXXXXXXXXXXXXXXXXXVXXXYXXPXXXXXXXXXDXDXXXXXXLIXXXKLAPXXXGXXXXXXXXXXXXXXXXXXXXXXXXXXXXXXXXXXXXXXXXXXXXXXXXXXXXXXXXXXXXXXXXXXXXXXXXXXXXXXXXXXXXXXXXXXXXXXXXXXXXXXXXXXXXXXXXXXXXXXXXXXXXXXXXXXXXXXXXXXXXXXXXXXXXXXXXXXXXXXXXXXXXXECPICFLXXPXXXNXSXCCXXXICXECFXXXKXXXXXXXXXXXXXXXXXXXXXXXXXXXXXXXXXXXXXXXCPXCXXXXXXVXYXXXXXXXXXXXXXXXXXXXXXXXXXXXXXXXXXXXXXXXXXXXXXXXXXXXXXXXXXXXXXXXXXXXXXXXXXXXXXXXXXXXXXXXXXXXXXXXXXXXXXEXXXXXXXXXXXXXXXXXXXXXXXXXXXXXXXXXXXXXXXXXXXXXXXXXXXXXXXXXXXXXXXXXXXXXXXXXXXXXXXXXXXXXXXXXXXXXXXXXXXXXXXXXXXXXXXXXXXXXXXXXXXXXXXXXXXXEXXMXXEAIXXSXXXXXXXXXXXXXXXXXXXXXXXXXXXXXXXXXXXXXXXXXXXXXXXXXXXXXXXXXXXXXXXXXXXXXXXXXXXXXXXXXXXXXXXXXXXXXXXXXXXXXXXXXXXXXXXXXXXXXXXXXXXXXXXXXXXXXXXXXXXXXXXXXXXXXXXXXXXXXXXXXXXXXXXXXXXXXXXXXXXXXXXXXXXXXXXXXXXXXXXXXXXXXXXXXXXXXXXXXXXXXXXXXXXXXXXXXXXXXXXXXXXXXXXXXXXXXXXXXXXXXXXXXXXXXXXXXXXXXXXXXXXXXXXXXXXXXXXXXXXXXXXXXXXXXXXXXXXXXXXXXXXXXXXXXXXXXXXXXXXXXXXXXX

SEQ ID NO: 17391 - protein, 906 aa, Artificial; identical to SEQ ID NO: 17383
  Consensus of Sequence ID NO. 182 and its homologs
  MISC_FEATURE (1)..(1): Absent or Pro
  MISC_FEATURE (2)..(2): Absent or Ser
  MISC_FEATURE (3)..(3): Absent or Glu
  MISC_FEATURE (4)..(4): Absent or Phe
  MISC_FEATURE (5)..(5): Absent or Cys
  MISC_FEATURE (6)..(6): Absent or Ser
  MISC_FEATURE (7)..(7): Absent or Ser
  MISC_FEATURE (8)..(8): Absent or Ser
  MISC_FEATURE (9)..(9): Absent or Ser
  MISC_FEATURE (10)..(10): Absent or Gly
  MISC_FEATURE (11)..(11): Absent or Ser
  MISC_FEATURE (12)..(12): Absent or Ser
  MISC_FEATURE (13)..(13): Absent or Arg or Met
  MISC_FEATURE (14)..(14): Absent or Met or Cys or Gln
  MISC_FEATURE (15)..(15): Absent or Asp or Ala
  MISC_FEATURE (16)..(16): Absent or Met or Ser or Cys
  MISC_FEATURE (17)..(17): Absent or Asp or Ser or Cys or Val or Gln
  MISC_FEATURE (18)..(18): Absent or Gln or Gly or Leu or Ser or Ile
  MISC_FEATURE (19)..(19): Absent or Ala or Thr or Ser or Gly or Phe
  MISC_FEATURE (20)..(20): Absent or Ala or Asp or Ser or Glu or Phe
  MISC_FEATURE (21)..(21): Absent or Ser or Arg or Lys or Glu
  MISC_FEATURE (22)..(22): Absent or Gly or Ala or Met or Glu or Lys
  MISC_FEATURE (23)..(23): Absent or Lys or Glu or Asp
  MISC_FEATURE (24)..(24): Absent or Ala or Glu or Asn or Asp
  MISC_FEATURE (25)..(25): Absent or Met or Leu or Val or Pro
  MISC_FEATURE (26)..(26): Absent or Pro or His or Val or Leu
  MISC_FEATURE (27)..(27): Absent or Leu or Val or Cys or Gly
  MISC_FEATURE (28)..(28): Absent or Ile or Gly or Arg
  MISC_FEATURE (29)..(29): Absent or Pro or Leu or Ile or Met
  MISC_FEATURE (30)..(30): Absent or Ser or Asp
  MISC_FEATURE (31)..(31): Absent or Glu or Pro or Ala
  MISC_FEATURE (32)..(32): Absent or Lys or Thr or Ala or Met or Leu
  MISC_FEATURE (33)..(33): Absent or Ser or Thr or Met or Ala
  MISC_FEATURE (34)..(34): Absent or Asp or Glu or Pro or Ser
  MISC_FEATURE (35)..(35): Absent or Pro or Glu
  MISC_FEATURE (36)..(36): Absent or Asn or Glu or Thr
  MISC_FEATURE (37)..(37): Absent or Ser or Tyr or Phe
  MISC_FEATURE (38)..(38): Absent or Glu or Ala
  MISC_FEATURE (39)..(39): Ala or Val or Thr or Absent or Ser
  MISC_FEATURE (40)..(40): Glu or Gln or Absent
  MISC_FEATURE (42)..(42): Glu or Lys or Absent
  MISC_FEATURE (45)..(45): His or Gln or Absent or Lys
  MISC_FEATURE (46)..(46): Ser or Ala or Glu or Absent
  MISC_FEATURE (47)..(47): Leu or Phe or Absent
  MISC_FEATURE (48)..(48): Tyr or Ile or Absent or Thr
  MISC_FEATURE (49)..(49): Ala or Asn or Absent or Ser
  MISC_FEATURE (50)..(50): Ile or Absent or Val or Ala
  MISC_FEATURE (51)..(51): Pro or Absent or Ala
  MISC_FEATURE (53)..(53): Ile or Leu or Absent
  MISC_FEATURE (54)..(54): Asp or Absent or Glu
  MISC_FEATURE (55)..(55): Lys or Absent or Ser or Gly
  MISC_FEATURE (57)..(57): Trp or Absent or Ser or Phe
  MISC_FEATURE (58)..(58): Ala or Thr or Ile or Absent or Leu or Val
  MISC_FEATURE (59)..(59): Ile or Phe or Absent or Leu
  MISC_FEATURE (60)..(60): Pro or Asn or Absent or Lys or Gln
  MISC_FEATURE (61)..(61): Ser or Absent or Arg or Thr
  MISC_FEATURE (62)..(62): Cys or Arg or Absent
  MISC_FEATURE (63)..(63): Gln or Lys or Asp or Absent or Asn
  MISC_FEATURE (64)..(64): Gly or Glu or Ser or Absent or Asp or Asn
  MISC_FEATURE (65)..(65): Gly or Glu or Absent
  MISC_FEATURE (66)..(66): Ala or Gly or Absent or Lys or Asp
  MISC_FEATURE (67)..(67): Gly or Absent or Arg
  MISC_FEATURE (68)..(68): Phe or Ser or Absent
  MISC_FEATURE (69)..(69): Asp or Gln or Absent or Arg or Thr
  MISC_FEATURE (70)..(70): Val or Ala or Absent
  MISC_FEATURE (71)..(71): Val or Ala or Met or Absent
  MISC_FEATURE (72)..(72): Val or Phe or Absent or Tyr
  MISC_FEATURE (73)..(73): Ala or Absent or Ser
  MISC_FEATURE (74)..(74): Met or Leu or Absent or Ile
  MISC_FEATURE (77)..(77): Val or Ala or Absent or Thr or Pro
  MISC_FEATURE (78)..(78): Asn or Absent or Asp
  MISC_FEATURE (80)..(80): Pro or Leu or Absent
  MISC_FEATURE (83)..(83): Ala or Lys or Absent or Thr or Asn
  MISC_FEATURE (84)..(84): Lys or Absent or Arg or Asn
  MISC_FEATURE (85)..(85): Arg or Lys or Absent
  MISC_FEATURE (86)..(86): Thr or Lys or Absent
  MISC_FEATURE (87)..(87): Phe or Absent or Gln or Tyr
  MISC_FEATURE (88)..(88): Leu or Met or Absent or Ile or Val
  MISC_FEATURE (89)..(89): Ser or Leu or Absent
  MISC_FEATURE (90)..(90): Thr or Ser or Absent or Tyr or His or Phe
  MISC_FEATURE (91)..(91): Val or Gly or Absent or Ala or Ser
  MISC_FEATURE (92)..(92): Tyr or His or Absent
  MISC_FEATURE (94)..(94): Pro or Ala or Ser or Absent or Thr or Val or Met
  MISC_FEATURE (95)..(95): Glu or Asn or Absent or Lys or Thr or Arg
  MISC_FEATURE (96)..(96): Thr or Glu or Absent or Arg or His or Asn
  MISC_FEATURE (97)..(97): Ser or Ala or Absent or Gly
  MISC_FEATURE (98)..(98): Ser or Asp or Absent or Gly
  MISC_FEATURE (99)..(99): Absent or Thr
  MISC_FEATURE (100)..(100): Absent or Gly
  MISC_FEATURE (101)..(101): Absent or Thr
  MISC_FEATURE (102)..(102): Absent or Gly
  MISC_FEATURE (103)..(103): Ala or Asp or Asn or Absent or Thr
  MISC_FEATURE (104)..(104): Thr or Gln or Absent or His or Met or Asn
  MISC_FEATURE (105)..(105): Ile or Ser or Absent or Pro or Leu
  MISC_FEATURE (106)..(106): Thr or Val or Absent or Pro or Leu
  MISC_FEATURE (107)..(107): Asp or Asn or Absent or Glu
  MISC_FEATURE (108)..(108): Tyr or Phe or Absent or Cys
  MISC_FEATURE (109)..(109): His or Absent or Gln or Lys
  MISC_FEATURE (111)..(111): Ser or Ala or Absent
  MISC_FEATURE (115)..(115): Phe or Ile or Absent or Thr
  MISC_FEATURE (116)..(116): Glu or Absent or Gln
  MISC_FEATURE (117)..(117): Ile or Val or Met or Absent or Thr
  MISC_FEATURE (118)..(118): Ser or Thr or Absent or Met or Asp
  MISC_FEATURE (120)..(120): Ala or Absent or Val
  MISC_FEATURE (122)..(122): Leu or Ala or Absent or Thr
  MISC_FEATURE (123)..(123): Ile or Phe or Absent or Met or Thr or Val
  MISC_FEATURE (130)..(130): Ala or Leu or Absent or Ser
  MISC_FEATURE (132)..(132): Val or Leu or Absent
  MISC_FEATURE (134)..(134): Ile or Val or Absent
  MISC_FEATURE (135)..(135): Ile or Absent or Val
  MISC_FEATURE (138)..(138): Pro or Absent or Gly
  MISC_FEATURE (139)..(139): Lys or Glu or Absent
  MISC_FEATURE (140)..(140): Asp or Asn or Absent or Arg or Lys
  MISC_FEATURE (141)..(141): Ser or Ala or Absent
  MISC_FEATURE (142)..(142): Thr or Glu or Absent or Gly
  MISC_FEATURE (143)..(143): Ser or Absent or Cys
  MISC_FEATURE (144)..(144): Pro or Absent or Arg
  MISC_FEATURE (146)..(146): Asn or Arg or Lys or Absent or Gln or Thr
  MISC_FEATURE (147)..(147): Leu or Phe or Absent
  MISC_FEATURE (148)..(148): Glu or Gln or Absent
  MISC_FEATURE (150)..(150): Trp or Absent or Val
  MISC_FEATURE (151)..(151): Gly or Asn or Absent or Cys or Asp
  MISC_FEATURE (152)..(152): Pro or Ser or Absent or Gln
  MISC_FEATURE (153)..(153): Gly or Ser or Absent
  MISC_FEATURE (154)..(154): Gln or Absent or His
  MISC_FEATURE (155)..(155): Leu or Absent or Val
  MISC_FEATURE (156)..(156): Leu or Glu or Absent
  MISC_FEATURE (157)..(157): Arg or Lys or Absent
  MISC_FEATURE (159)..(159): Ile or Phe or Absent
  MISC_FEATURE (160)..(160): Phe or Tyr or His or Absent or Asn
  MISC_FEATURE (161)..(161): Val or Ile or Absent
  MISC_FEATURE (162)..(162): Ala or Ser or Pro or Absent or Asp
  MISC_FEATURE (163)..(163): Ser or Gln or Absent or Gly
  MISC_FEATURE (164)..(164): Ser or Lys or Absent
  MISC_FEATURE (165)..(165): Val or Absent or Ile
  MISC_FEATURE (168)..(168): Ser or Absent or Pro or Ala
  MISC_FEATURE (169)..(169): Val or Ile or Absent or Leu
  MISC_FEATURE (171)..(171): Gly or Val or Absent or Thr
  MISC_FEATURE (173)..(173): Gly or Absent or Glu
  MISC_FEATURE (176)..(176): Glu or Absent or His
  MISC_FEATURE (178)..(178): Val or Ile or Absent
  MISC_FEATURE (181)..(181): Ser or Asp or Absent or Asn
  MISC_FEATURE (182)..(182): Gln or His or Ser or Absent
  MISC_FEATURE (183)..(183): Asn or His or Asp or Absent or Glu
  MISC_FEATURE (185)..(185): Glu or Thr or Absent
  MISC_FEATURE (186)..(186): Ser or Phe or His or Absent or Leu
  MISC_FEATURE (187)..(187): Ile or Val or Absent
  MISC_FEATURE (188)..(188): Ala or Ser or Absent
  MISC_FEATURE (190)..(190): Val or Absent or Ile
  MISC_FEATURE (193)..(193): Glu or Absent or Ala or Gln or Asp
  MISC_FEATURE (194)..(194): Pro or Absent or Ser
  MISC_FEATURE (195)..(195): Val or Ala or Ser or Absent or Pro
  MISC_FEATURE (196)..(196): Val or Asn or Arg or Absent or Pro or Thr or Gln or Glu
  MISC_FEATURE (197)..(197): Ser or Pro or Absent
  MISC_FEATURE (198)..(198): Arg or Lys or Absent
  MISC_FEATURE (200)..(200): Val or Thr or Absent or Ala
  MISC_FEATURE (201)..(201): Phe or Tyr or Absent
  MISC_FEATURE (202)..(202): Gly or Asp or Absent or Asn
  MISC_FEATURE (203)..(203): Gln or Pro or His or Absent or Gly or Arg or Asn or Asp
  MISC_FEATURE (204)..(204): Ser or Thr or Leu or Absent or Ala
  MISC_FEATURE (205)..(205): Ala or Gly or Absent
  MISC_FEATURE (206)..(206): Ser or Tyr or Absent
  MISC_FEATURE (207)..(207): Thr or Tyr or Absent or Arg
  MISC_FEATURE (208)..(208): Pro or Ser or Lys or Absent or Arg
  MISC_FEATURE (209)..(209): Gly or Lys or Absent or Glu
  MISC_FEATURE (210)..(210): Gln or Thr or Glu or Absent or Gly
  MISC_FEATURE (211)..(211): Asn or Absent or Asp or Gly
  MISC_FEATURE (212)..(212): Absent or Cys
  MISC_FEATURE (213)..(213): Ser or His or Absent or Gly
  MISC_FEATURE (214)..(214): Asn or Thr or Ser or Absent or Asp
  MISC_FEATURE (215)..(215): Ala or Gly or Leu or Absent or Ser
  MISC_FEATURE (216)..(216): Thr or Ala or Asp or Absent or Glu
  MISC_FEATURE (217)..(217): Leu or Pro or Lys or Absent or Gly or Glu
  MISC_FEATURE (218)..(218): Glu or Gly or Absent or Asp
  MISC_FEATURE (219)..(219): Ala or Ile or Absent or Ser or Cys
  MISC_FEATURE (220)..(220): Gly or Absent or Ser or Asn
  MISC_FEATURE (221)..(221): Asn or Ser or Absent or Ala
  MISC_FEATURE (223)..(223): Lys or Absent or Arg
  MISC_FEATURE (225)..(225): Gln or Glu or Absent or Leu
  MISC_FEATURE (227)..(227): Asp or Absent or Glu or Val
  MISC_FEATURE (229)..(229): Val or Tyr or Glu or Absent
  MISC_FEATURE (230)..(230): Glu or Absent or Arg
  MISC_FEATURE (231)..(231): Asp or Glu or Absent or His
  MISC_FEATURE (235)..(235): Ser or Cys or Ala or Absent or Thr
  MISC_FEATURE (237)..(237): Ser or Ala or Absent
  MISC_FEATURE (238)..(238): Absent or any naturally occurring amino acid
  MISC_FEATURE (239)..(239): Gly or Absent or Lys or Arg
  MISC_FEATURE (241)..(241): Arg or Absent or Gly
  MISC_FEATURE (242)..(242): Arg or Gln or Absent
  MISC_FEATURE (244)..(244): Val or Ala or Absent or Ser
  MISC_FEATURE (248)..(248): Ala or Ile or Absent or Leu
  MISC_FEATURE (249)..(249): Asn or Absent or Asp
  MISC_FEATURE (250)..(250): Val or Absent or Ile
  MISC_FEATURE (251)..(251): Ser or Gly or Asp or Absent or Glu or Pro or Ala or Asn
  MISC_FEATURE (252)..(252): Thr or Ser or Absent or Arg
  MISC_FEATURE (253)..(253): Gly or Absent or Glu
  MISC_FEATURE (254)..(254): Ala or Val or Glu or Absent
  MISC_FEATURE (256)..(256): Gln or Glu or Absent or His or Val or Arg
  MISC_FEATURE (257)..(257): Ala or Val or Pro or Absent
  MISC_FEATURE (258)..(258): Val or Ile or Absent or Ala
  MISC_FEATURE (259)..(259): Glu or Lys or Absent or Arg
  MISC_FEATURE (260)..(260): Gly or Absent or Asp
  MISC_FEATURE (261)..(261): Ile or Absent or Val
  MISC_FEATURE (262)..(262): Ser or Pro or Absent or Thr or Leu
  MISC_FEATURE (263)..(263): Arg or Absent or Lys or Thr
  MISC_FEATURE (264)..(264): Asp or Ser or Absent
  MISC_FEATURE (265)..(265): Ile or Leu or Absent or Met
  MISC_FEATURE (267)..(267): Ala or Val or Absent or Ile
  MISC_FEATURE (271)..(271): Val or Absent or Ile
  MISC_FEATURE (273)..(273): Ala or Val or Ser or Absent
  MISC_FEATURE (275)..(275): Gln or Glu or Asn or Absent or Leu or Pro
  MISC_FEATURE (276)..(276): Pro or Val or Ser or Absent or Ala
  MISC_FEATURE (277)..(277): Ala or Val or Asn or Absent or Glu or Pro or Ser
  MISC_FEATURE (278)..(278): Ser or Absent or Gly or Cys
  MISC_FEATURE (279)..(279): Absent or Ser
  MISC_FEATURE (280)..(280): Absent or Asp
  MISC_FEATURE (281)..(281): Pro or Absent
  MISC_FEATURE (282)..(282): Asp or Thr or Gly or Absent
  MISC_FEATURE (283)..(283): Gly or Ser or Absent or Phe or Arg or His
  MISC_FEATURE (284)..(284): Pro or Ala or Absent or Ser or His or Gln
  MISC_FEATURE (285)..(285): Gln or Leu or Absent or Lys
  MISC_FEATURE (286)..(286): Ser or Tyr or Absent or Leu
  MISC_FEATURE (288)..(288): Val or Absent or Ile
  MISC_FEATURE (290)..(290): Val or Ala or Absent
  MISC_FEATURE (293)..(293): Ser or Leu or Absent
  MISC_FEATURE (294)..(294): Ser or Absent or Glu
  MISC_FEATURE (295)..(295): Tyr or Phe or Absent or Arg or His
  MISC_FEATURE (296)..(296): Ala or Absent or Asn
  MISC_FEATURE (297)..(297): Glu or Asp or Absent or Gly
  MISC_FEATURE (298)..(298): Asn or Absent or Phe
  MISC_FEATURE (299)..(299): Absent or Phe
  MISC_FEATURE (300)..(300): Phe or Absent or Gln
  MISC_FEATURE (301)..(301): Ser or Gly or Absent or Asn
  MISC_FEATURE (302)..(302): Thr or Asp or Absent or Glu
  MISC_FEATURE (303)..(303): Pro or Lys or Absent or Thr or Ala
  MISC_FEATURE (304)..(304): Arg or Absent or Lys
  MISC_FEATURE (306)..(306): Leu or Phe or Absent
  MISC_FEATURE (307)..(307): Gly or Absent or Arg
  MISC_FEATURE (308)..(308): Met or Ile or Absent or any naturally occurring amino acid
  MISC_FEATURE (310)..(310): Tyr or His or Absent
  MISC_FEATURE (312)..(312): Phe or Tyr or Absent or Ser
  MISC_FEATURE (317)..(317): His or Ala or Absent or Ser
  MISC_FEATURE (318)..(318): Leu or Ile or Absent
  MISC_FEATURE (320)..(320): His or Ala or Absent or Ser
  MISC_FEATURE (321)..(321): Val or Ile or Absent or Ala or Thr
  MISC_FEATURE (322)..(322): Glu or Lys or Absent or Arg or Pro or His or Leu
  MISC_FEATURE (323)..(323): Ala or Phe or Absent or Cys or Ser or Arg
  MISC_FEATURE (324)..(324): Pro or Thr or Absent
  MISC_FEATURE (325)..(325): Val or Ser or Absent or Phe or Ile
  MISC_FEATURE (326)..(326): Pro or Asp or Absent or Cys or Gln or Glu
  MISC_FEATURE (327)..(327): Asp or Gly or Glu or Absent
  MISC_FEATURE (328)..(328): Arg or Thr or Pro or Absent or Ser or Glu
  MISC_FEATURE (329)..(329): Glu or Lys or Absent or Pro or Ser
  MISC_FEATURE (330)..(330): Pro or Asp or Absent or Ala or Asn
  MISC_FEATURE (331)..(331): Ser or Asp or Absent or Asn or any naturally occurring amino acid or Pro or Ala or Val
  MISC_FEATURE (332)..(332): Asp or Asn or Absent or Glu or Gly
  MISC_FEATURE (333)..(333): Ala or Absent or Leu or His or Asn
  MISC_FEATURE (334)..(334): Pro or Ala or Absent or Gln
  MISC_FEATURE (335)..(335): Arg or Pro or Absent or Ser
  MISC_FEATURE (336)..(336): Absent or Asn or Ala
  MISC_FEATURE (337)..(337): Absent or Asn or Thr or Ser
  MISC_FEATURE (338)..(338): Absent or Val or Thr or Gly or Asp
  MISC_FEATURE (339)..(339): Absent or Ala or Asn or Ser
  MISC_FEATURE (340)..(340): Absent or Asn or Glu or Ser or Lys
  MISC_FEATURE (341)..(341): Absent or Glu or Asp or Ser or Leu
  MISC_FEATURE (342)..(342): Absent or Phe or Ser or Gly or Val or Glu
  MISC_FEATURE (343)..(343): Absent or Pro or Thr or Lys
  MISC_FEATURE (344)..(344): Absent or Ile or Val or Ser or Ala
  MISC_FEATURE (345)..(345): Absent or His or Val or Gly or Ser
  MISC_FEATURE (346)..(346): Absent or Ser
  MISC_FEATURE (347)..(347): Absent or Gly
  MISC_FEATURE (348)..(348): Absent or Gly
  MISC_FEATURE (349)..(349): Absent or Ala
  MISC_FEATURE (350)..(350): Glu or Val or Absent
  MISC_FEATURE (351)..(351): Ala or Absent
  MISC_FEATURE (352)..(352): Thr or Val or Absent or Arg or Ile
  MISC_FEATURE (353)..(353): Asn or Lys or Absent
  MISC_FEATURE (356)..(356): Glu or Gly or Lys or Absent or Gln or Pro
  MISC_FEATURE (357)..(357): Gly or Thr or Ser or Absent
  MISC_FEATURE (358)..(358): Val or Ile or Absent or Phe
  MISC_FEATURE (361)..(361): Ala or Gly or Absent
  MISC_FEATURE (362)..(362): Phe or Absent or Leu
  MISC_FEATURE (363)..(363): Ser or Cys or Absent or Phe
  MISC_FEATURE (367)..(367): Absent or Arg
  MISC_FEATURE (368)..(368): Absent or Thr
  MISC_FEATURE (369)..(369): Absent or Leu
  MISC_FEATURE (370)..(370): Absent or Asn
  MISC_FEATURE (371)..(371): Absent or His
  MISC_FEATURE (372)..(372): Absent or Ala
  MISC_FEATURE (373)..(373): Absent or Arg
  MISC_FEATURE (374)..(374): Absent or Lys
  MISC_FEATURE (375)..(375): Absent or Ile
  MISC_FEATURE (376)..(376): Absent or Leu
  MISC_FEATURE (377)..(377): Absent or His
  MISC_FEATURE (378)..(378): Absent or Gly
  MISC_FEATURE (379)..(379): Absent or Lys
  MISC_FEATURE (380)..(380): Absent or Ser
  MISC_FEATURE (381)..(381): Absent or Leu
  MISC_FEATURE (382)..(382): Absent or Ile
  MISC_FEATURE (383)..(383): Absent or Ile
  MISC_FEATURE (384)..(384): Absent or Phe
  MISC_FEATURE (385)..(385): Absent or Asn
  MISC_FEATURE (387)..(387): Pro or Lys or Absent or Arg
  MISC_FEATURE (388)..(388): Asp or Asn or Absent
  MISC_FEATURE (390)..(390): Lys or Absent or Arg
  MISC_FEATURE (391)..(391): Lys or Met or Phe or Absent or Leu
  MISC_FEATURE (395)..(395): Leu or Val or Absent
  MISC_FEATURE (397)..(397): Ala or Absent or Ser
  MISC_FEATURE (398)..(398): Glu or Lys or Absent or Asn
  MISC_FEATURE (399)..(399): Ala or Thr or Absent or Ser or Gln or Cys or Arg
  MISC_FEATURE (400)..(400): Ala or Absent or Ser
  MISC_FEATURE (402)..(402): Lys or Ser or Asp or Absent
  MISC_FEATURE (404)..(404): Gly or Absent or Asp
  MISC_FEATURE (407)..(407): Asn or Trp or Absent or Ser
  MISC_FEATURE (410)..(410): Asn or Glu or Absent or Asp
  MISC_FEATURE (414)..(414): Leu or Cys or Arg or Absent or Val or Lys
  MISC_FEATURE (416)..(416): Asp or Asn or Absent or Ala
  MISC_FEATURE (419)..(419): Thr or Ala or Ser or Absent
  MISC_FEATURE (421)..(421): Leu or Gly or Absent or Trp
  MISC_FEATURE (422)..(422): Ile or Lys or Absent
  MISC_FEATURE (423)..(423): Arg or Val or Leu or Absent or Pro or Met or Ala
  MISC_FEATURE (424)..(424): Ile or Cys or Pro or Absent or Asp
  MISC_FEATURE (425)..(425): Gly or Lys or Glu or Absent or Pro or Gln
  MISC_FEATURE (426)..(426): Glu or Gln or Ser or Absent or Tyr
  MISC_FEATURE (427)..(427): Lys or Thr or Absent or Ala or Leu
  MISC_FEATURE (428)..(428): Pro or Absent
  MISC_FEATURE (429)..(429): Gln or Asn or Absent or Asp or Ser or Glu
  MISC_FEATURE (430)..(430): Val or Ile or Absent
  MISC_FEATURE (431)..(431): Lys or Val or Absent or Thr
  MISC_FEATURE (432)..(432): Asp or Absent or Gln
  MISC_FEATURE (433)..(433): Ile or Val or Absent
  MISC_FEATURE (434)..(434): Absent or Ser
  MISC_FEATURE (435)..(435): Absent or Ile
  MISC_FEATURE (436)..(436): Absent or Tyr
  MISC_FEATURE (437)..(437): Absent or Leu
  MISC_FEATURE (438)..(438): Absent or Thr
  MISC_FEATURE (439)..(439): Absent or Ser
  MISC_FEATURE (440)..(440): Absent or Glu
  MISC_FEATURE (441)..(441): Absent or Leu
  MISC_FEATURE (442)..(442): Absent or Cys
  MISC_FEATURE (443)..(443): Absent or Gln
  MISC_FEATURE (444)..(444): Val or Ile or Absent
  MISC_FEATURE (445)..(445): Asn or Lys or Gln or Absent or Pro
  MISC_FEATURE (446)..(446): Val or Absent or Ile
  MISC_FEATURE (447)..(447): Val or Absent or Met
  MISC_FEATURE (448)..(448): Gln or Asn or Absent or Met
  MISC_FEATURE (449)..(449): His or Cys or Absent
  MISC_FEATURE (450)..(450): Ala or Pro or Absent
  MISC_FEATURE (451)..(451): Glu or Lys or Absent or Gln
  MISC_FEATURE (452)..(452): Glu or Asp or Absent
  MISC_FEATURE (453)..(453): Absent or Asp
  MISC_FEATURE (454)..(454): Absent or Asp
  MISC_FEATURE (455)..(455): Absent or Gly
  MISC_FEATURE (457)..(457): Ala or Cys or Absent or Tyr
  MISC_FEATURE (463)..(463): Cys or Val or Absent
  MISC_FEATURE (464)..(464): Tyr or Ser or Thr or Absent
  MISC_FEATURE (465)..(465): Asn or Ser or Gly or Absent or Ala
  MISC_FEATURE (466)..(466): Leu or Absent or Ile or Val or Met
  MISC_FEATURE (467)..(467): Val or Ile or Leu or Absent
  MISC_FEATURE (468)..(468): Ala or Val or Ser or Absent or Pro
  MISC_FEATURE (469)..(469): Asn or Asp or Absent
  MISC_FEATURE (473)..(473): Asp or Asn or Ser or Absent
  MISC_FEATURE (474)..(474): Asp or Gly or Absent
  MISC_FEATURE (475)..(475): Gly or Ser or Absent or His or Arg
  MISC_FEATURE (476)..(476): Ser or His or Absent or Cys or Arg
  MISC_FEATURE (477)..(477): Thr or Ser or Absent
  MISC_FEATURE (478)..(478): Leu or Absent or Met or Val
  MISC_FEATURE (479)..(479): Leu or Met or Absent or Ile or Val
  MISC_FEATURE (481)..(481): Ser or Absent or Thr
  MISC_FEATURE (482)..(482): Ser or Thr or Absent
  MISC_FEATURE (483)..(483): Ala or Ser or Tyr or Absent
  MISC_FEATURE (485)..(485): Arg or Absent or His
  MISC_FEATURE (487)..(487): Gln or Cys or Absent or Thr or Ala
  MISC_FEATURE (488)..(488): Gln or Arg or Absent or Glu
  MISC_FEATURE (492)..(492): Ser or Gly or Absent
  MISC_FEATURE (493)..(493): Ile or Val or Absent
  MISC_FEATURE (494)..(494): Asp or Asn or Absent
  MISC_FEATURE (495)..(495): Val or Ile or Leu or Absent
  MISC_FEATURE (496)..(496): Glu or Val or Leu or Absent
  MISC_FEATURE (499)..(499): Asn or Asp or Glu or Absent or Lys
  MISC_FEATURE (500)..(500): Val or Absent or Ala
  MISC_FEATURE (501)..(501): Ser or Absent or Ala or Thr
  MISC_FEATURE (502)..(502): Arg or Thr or Absent or His
  MISC_FEATURE (503)..(503): Val or Ala or Absent or Ile
  MISC_FEATURE (504)..(504): Ser or Absent or Thr
  MISC_FEATURE (505)..(505): Ser or Pro or Absent
  MISC_FEATURE (506)..(506): Ser or Absent or Asn or Gln or Glu
  MISC_FEATURE (507)..(507): Asp or Absent or Asn
  MISC_FEATURE (509)..(509): Leu or Asp or Absent or Gly or Cys or Glu
  MISC_FEATURE (510)..(510): Ala or Tyr or Absent or Phe
  MISC_FEATURE (513)..(513): Asn or Absent or Arg or Ser
  MISC_FEATURE (514)..(514): Leu or Ala or Absent or Val or Thr
  MISC_FEATURE (516)..(516): Gly or Ala or Absent or Thr
  MISC_FEATURE (517)..(517): Leu or Met or Absent or Ile or Val
  MISC_FEATURE (518)..(518): Gln or His or Asp or Absent or Ser
  MISC_FEATURE (519)..(519): Asn or Gly or Absent
  MISC_FEATURE (520)..(520): Ser or Asp or Absent or Thr or Asn or His
  MISC_FEATURE (521)..(521): Cys or Ser or Absent or Asn
  MISC_FEATURE (522)..(522): Ile or Val or Absent
  MISC_FEATURE (523)..(523): Val or Absent or Leu
  MISC_FEATURE (524)..(524): Ala or Absent or Ser or Val
  MISC_FEATURE (525)..(525): Thr or Val or Absent
  MISC_FEATURE (526)..(526): Val or Ser or Absent or Cys
  MISC_FEATURE (530)..(530): Ile or Thr or Val or Absent
  MISC_FEATURE (531)..(531): Gln or Ser or Absent or Asp
  MISC_FEATURE (532)..(532): Pro or Val or Absent or Ile
  MISC_FEATURE (533)..(533): Ser or Gln or Pro or Absent
  MISC_FEATURE (534)..(534): Ser or Asn or Glu or Absent or Gln
  MISC_FEATURE (535)..(535): Leu or Ile or Absent or Met
  MISC_FEATURE (536)..(536): His or Lys or Absent or Ser or Arg
  MISC_FEATURE (537)..(537): Leu or Tyr or Absent
  MISC_FEATURE (539)..(539): His or Lys or Absent or Ala or Trp or Arg
  MISC_FEATURE (540)..(540): Ser or Ile or Lys or Absent or Leu or Arg or Gln
  MISC_FEATURE (541)..(541): Ala or Gly or Absent or Val or Leu
  MISC_FEATURE (542)..(542): Ser or Leu or Absent or Lys or Glu or Ala
  MISC_FEATURE (543)..(543): Val or Pro or Asp or Absent or Lys or Thr or Leu
  MISC_FEATURE (544)..(544): Gly or Asp or Ser or Absent or Ala or Thr or Glu or Lys
  MISC_FEATURE (545)..(545): Ser or Ala or Absent or Thr or Pro or Asp
  MISC_FEATURE (546)..(546): Pro or Leu or Gly or Absent or Asn or Ala or His or Gln
  MISC_FEATURE (547)..(547): Leu or Ile or Lys or Absent or Asn or Ser or Glu or Asp or Thr
  MISC_FEATURE (548)..(548): Lys or Arg or Absent or Gly
  MISC_FEATURE (549)..(549): Gly or Ser or Absent or Glu or Arg
  MISC_FEATURE (550)..(550): Gly or Absent or Ala
  MISC_FEATURE (551)..(551): Lys or Pro or Absent or Asp or Arg or Cys
  MISC_FEATURE (552)..(552): Glu or Ser or Absent or Arg or Ala or Thr
  MISC_FEATURE (554)..(554): Lys or Asn or Leu or Absent or Ser or Thr or Val
  MISC_FEATURE (556)..(556): Ser or Absent or Leu or Asp
  MISC_FEATURE (557)..(557): Ala or Asn or Absent or Asp or Glu
  MISC_FEATURE (558)..(558): Ile or Absent or Val
  MISC_FEATURE (559)..(559): Asn or Gln or Absent or Ala or Ser or Thr
  MISC_FEATURE (560)..(560): Val or Leu or Ser or Absent or Asn
  MISC_FEATURE (561)..(561): Absent or Asn
  MISC_FEATURE (563)..(563): Ser or Ile or Absent or Phe or Leu
  MISC_FEATURE (564)..(564): Leu or Arg or Absent or Phe or Pro or Met or Thr
  MISC_FEATURE (565)..(565): Lys or Gln or Absent or Arg or Ala
  MISC_FEATURE (566)..(566): Phe or Tyr or Absent or Cys or Ser or Ala
  MISC_FEATURE (567)..(567): Ala or Ser or Absent or Asn
  MISC_FEATURE (568)..(568): Ser or Ala or Glu or Absent or Asp or Asn
  MISC_FEATURE (571)..(571): Glu or Met or Absent or Arg or Lys
  MISC_FEATURE (572)..(572): Ser or Ala or Absent
  MISC_FEATURE (573)..(573): Val or Ala or Gly or Absent or Leu
  MISC_FEATURE (574)..(574): Met or Leu or Absent or Ile
  MISC_FEATURE (575)..(575): Gln or Arg or Ser or Absent or Leu
  MISC_FEATURE (576)..(576): Ser or Ala or Absent or His
  MISC_FEATURE (577)..(577): Met or Leu or Absent or His
  MISC_FEATURE (578)..(578): Lys or Gln or Absent or Thr or Ser
  MISC_FEATURE (579)..(579): Tyr or Phe or Absent or Val or Leu
  MISC_FEATURE (580)..(580): Glu or Lys or Absent or Ser
  MISC_FEATURE (583)..(583): Gln or Arg or Lys or Absent
  MISC_FEATURE (584)..(584): Val or Absent or Ile
  MISC_FEATURE (586)..(586): Pro or Ala or Absent
  MISC_FEATURE (587)..(587): Pro or Absent
  MISC_FEATURE (588)..(588): Lys or Met or Ile or Absent or Val
  MISC_FEATURE (589)..(589): Ala or Thr or Ser or Absent or Lys or Pro
  MISC_FEATURE (590)..(590): Asp or Absent or Ser or Asn
  MISC_FEATURE (591)..(591): Pro or Val or Absent or Ile
  MISC_FEATURE (593)..(593): Lys or Glu or Absent or Ala or Asp
  MISC_FEATURE (594)..(594): Ser or Gly or Absent or Cys or Asp or Glu
  MISC_FEATURE (596)..(596): Ser or Ala or Absent or Thr
  MISC_FEATURE (597)..(597): Val or Glu or Absent or Lys or Asp
  MISC_FEATURE (599)..(599): Ser or Ala or Absent or Gly
  MISC_FEATURE (600)..(600): Gly or Lys or Absent or Ser or Cys or Gln
  MISC_FEATURE (601)..(601): Gln or Asn or Absent or Lys or Leu
  MISC_FEATURE (603)..(603): Phe or Ile or Absent or Tyr or Leu
  MISC_FEATURE (610)..(610): Pro or Ser or Absent or Cys
  MISC_FEATURE (611)..(611): Thr or Ser or Absent
  MISC_FEATURE (612)..(612): Gly or Absent
  MISC_FEATURE (613)..(613): Ser or Absent
  MISC_FEATURE (614)..(614): Ile or Absent
  MISC_FEATURE (615)..(615): Arg or Asn or Absent
  MISC_FEATURE (616)..(616): Pro or Ser or Absent
  MISC_FEATURE (617)..(617): Leu or Pro or Absent
  MISC_FEATURE (618)..(618): Thr or Absent
  MISC_FEATURE (619)..(619): Glu or Lys or Absent or Asn or Cys
  MISC_FEATURE (620)..(620): Glu or Ser or Absent or Thr or Lys
  MISC_FEATURE (621)..(621): Pro or Lys or Absent or Gly or Asp
  MISC_FEATURE (622)..(622): Arg or Glu or Absent or Lys or Ser
  MISC_FEATURE (623)..(623): Ile or Asn or Absent or Ser
  MISC_FEATURE (624)..(624): Glu or Gly or Absent or Asp or Arg or Gln or His
  MISC_FEATURE (625)..(625): Ser or Lys or Absent or Ala or Thr
  MISC_FEATURE (626)..(626): Ile or Cys or Absent or Leu
  MISC_FEATURE (627)..(627): Pro or Asp or Absent or Ser or Lys
  MISC_FEATURE (629)..(629): Leu or Absent or Thr
  MISC_FEATURE (630)..(630): Val or Ile or Absent
  MISC_FEATURE (631)..(631): Val or Ala or Absent or Leu
  MISC_FEATURE (642)..(642): Gln or Pro or Absent or Leu or Ser or Val
  MISC_FEATURE (643)..(643): Thr or Cys or Absent or Ser
  MISC_FEATURE (645)..(645): Phe or Absent or Tyr
  MISC_FEATURE (647)..(647): Arg or Absent or Lys
  MISC_FEATURE (648)..(648): Asn or Thr or Absent or Pro or Ser
  MISC_FEATURE (649)..(649): Ala or Thr or Met or Absent or Leu or Ser
  MISC_FEATURE (651)..(651): Phe or Tyr or Absent
  MISC_FEATURE (653)..(653): Ser or Absent or Ala
  MISC_FEATURE (657)..(657): Phe or Tyr or Absent
  MISC_FEATURE (658)..(658): Asn or Ser or Absent
  MISC_FEATURE (661)..(661): His or Ile or Absent or Val
  MISC_FEATURE (667)..(667): Ser or Absent or Thr
  MISC_FEATURE (668)..(668): Leu or Absent or Pro
  MISC_FEATURE (670)..(670): Phe or Tyr or Absent
  MISC_FEATURE (688)..(688): Asp or Ser or Lys or Absent or Asn or Gln or Glu
  MISC_FEATURE (690)..(690): Val or Cys or Absent
  MISC_FEATURE (692)..(692): Ala or Leu or Absent or Thr
  MISC_FEATURE (694)..(694): Leu or Val or Absent or Ile or Ala
  MISC_FEATURE (696)..(696): Leu or His or Absent or Phe or Tyr
  MISC_FEATURE (697)..(697): Val or Ala or Absent
  MISC_FEATURE (698)..(698): Ile or Absent or Val
  MISC_FEATURE (699)..(699): Gly or Arg or Glu or Absent or Asn or Asp
  MISC_FEATURE (700)..(700): Asn or Met or Absent or Leu or Glu or Gly
  MISC_FEATURE (701)..(701): Gly or Absent or Glu
  MISC_FEATURE (702)..(702): Met or Ile or Absent or Leu
  MISC_FEATURE (703)..(703): Ala or Absent or Cys or Val or Ile
  MISC_FEATURE (705)..(705): Pro or Absent or Ala
  MISC_FEATURE (707)..(707): Arg or Absent or Lys
  MISC_FEATURE (708)..(708): Val or Ile or Absent
  MISC_FEATURE (711)..(711): Leu or Absent or Val or Ile
  MISC_FEATURE (713)..(713): Gly or Absent or Ile
  MISC_FEATURE (730)..(730): Arg or Lys or Absent
  MISC_FEATURE (732)..(732): Ala or Thr or Val or Absent or Met
  MISC_FEATURE (733)..(733): Thr or Ala or Absent or Val
  MISC_FEATURE (744)..(744): Ser or Ala or Absent
  MISC_FEATURE (745)..(745): Ser or Absent or Leu
  MISC_FEATURE (747)..(747): Val or Absent or Ala or Asn or Ile
  MISC_FEATURE (749)..(749): Ile or Absent or Thr
  MISC_FEATURE (758)..(758): Val or Phe or Absent or Ala
  MISC_FEATURE (759)..(759): Glu or Val or Absent
  MISC_FEATURE (761)..(761): Phe or Tyr or Arg or Cys or Absent
  MISC_FEATURE (763)..(763): Lys or Asp or Thr or Ser or Absent
  MISC_FEATURE (764)..(764): Asp or Gln or Ile or Lys or Absent or Glu
  MISC_FEATURE (765)..(765): Gly or Absent or Ala
  MISC_FEATURE (766)..(766): Leu or Val or Absent or Lys or Arg
  MISC_FEATURE (767)..(767): Ser or Ala or Asn or Asp or Arg or Absent or Gln
  MISC_FEATURE (768)..(768): Asn or His or Cys or Lys or Ser or Tyr or Absent or Leu
  MISC_FEATURE (769)..(769): Tyr or Phe or Ala or Absent
  MISC_FEATURE (770)..(770): Ser or Thr or Absent
  MISC_FEATURE (772)..(772): Ala or Pro or Absent or Ser
  MISC_FEATURE (775)..(775): Val or Thr or Ala or Pro or Absent or Leu
  MISC_FEATURE (776)..(776): Lys or Glu or Asp or Gly or Absent
  MISC_FEATURE (777)..(777): Asp or Gln or His or Absent
  MISC_FEATURE (779)..(779): Ser or Thr or Arg or Absent or Gly
  MISC_FEATURE (780)..(780): Val or Arg or Leu or Absent or Phe or Ile
  MISC_FEATURE (782)..(782): Tyr or His or Gln or Absent
  MISC_FEATURE (784)..(784): Ile or Cys or Met or Lys or Arg or Absent
  MISC_FEATURE (790)..(790): Ile or Leu or Val or Absent
  MISC_FEATURE (792)..(792): Absent or Lys
  MISC_FEATURE (793)..(793): Absent or Val
  MISC_FEATURE (794)..(794): Absent or Cys
  MISC_FEATURE (795)..(795): Absent or Cys
  MISC_FEATURE (796)..(796): Absent or Phe
  MISC_FEATURE (797)..(797): Absent or Phe
  MISC_FEATURE (798)..(798): Absent or Pro
  MISC_FEATURE (799)..(799): Absent or Ala
  MISC_FEATURE (800)..(800): Absent or Cys
  MISC_FEATURE (801)..(801): Absent or Leu
  MISC_FEATURE (802)..(802): Absent or Leu
  MISC_FEATURE (803)..(803): Absent or Leu
  MISC_FEATURE (804)..(804): Absent or Ser
  MISC_FEATURE (805)..(805): Absent or Tyr
  MISC_FEATURE (806)..(806): Absent or Gln
  MISC_FEATURE (807)..(807): Absent or Leu
  MISC_FEATURE (808)..(808): Absent or Val
  MISC_FEATURE (809)..(809): Absent or Asp
  MISC_FEATURE (810)..(810): Absent or Leu
  MISC_FEATURE (811)..(811): Absent or Ile
  MISC_FEATURE (812)..(812): Absent or Val
  MISC_FEATURE (813)..(813): Absent or Val
  MISC_FEATURE (814)..(814): Absent or Leu
  MISC_FEATURE (815)..(815): Absent or Val
  MISC_FEATURE (816)..(816): Absent or Val
  MISC_FEATURE (817)..(817): Absent or Arg
  MISC_FEATURE (818)..(818): Absent or Thr
  MISC_FEATURE (819)..(819): Absent or Val
  MISC_FEATURE (820)..(820): Absent or Asp
  MISC_FEATURE (821)..(821): Absent or Gly
  MISC_FEATURE (822)..(822): Absent or Ala
  MISC_FEATURE (823)..(823): Absent or Leu
  MISC_FEATURE (824)..(824): Absent or Leu
  MISC_FEATURE (825)..(825): Absent or Ser
  MISC_FEATURE (826)..(826): Absent or Glu
  MISC_FEATURE (827)..(827): Absent or Ser
  MISC_FEATURE (828)..(828): Absent or Val
  MISC_FEATURE (832)..(832): Val or Thr or Ala or Absent
  MISC_FEATURE (834)..(834): Thr or Ile or Leu or Phe
  MISC_FEATURE (836)..(836): Phe or Met or Val
  MISC_FEATURE (840)..(840): Ala or Thr or Gly
  MISC_FEATURE (841)..(841): Gln or Lys or Ala
  MISC_FEATURE (847)..(847): Val or Ile or Ala or Met
  MISC_FEATURE (856)..(856): Ala or Glu or Ser
  MISC_FEATURE (858)..(858): Arg or Lys or Ile
  MISC_FEATURE (862)..(862): Gln or Val or Gly
  MISC_FEATURE (863)..(863): Glu or Gln or Asp
  MISC_FEATURE (864)..(864): Val or Ile
  MISC_FEATURE (865)..(865): Lys or Arg
  MISC_FEATURE (866)..(866): Val or Ile or Thr
  MISC_FEATURE (867)..(867): Ile or Leu or Met
  MISC_FEATURE (868)..(868): Val or Leu or Met or Ile
  MISC_FEATURE (871)..(871): Glu or Asn or Asp
  MISC_FEATURE (873)..(873): Val or Asn or Ile or Thr
  MISC_FEATURE (875)..(875): Ala or Pro or Gly or Glu
  MISC_FEATURE (877)..(877): Asp or Lys or Glu or Asn
  MISC_FEATURE (878)..(878): Arg or Leu or Ile
  MISC_FEATURE (880)..(880): Gln or Arg
  MISC_FEATURE (896)..(896): Phe or Tyr or His
  MISC_FEATURE (897)..(897): Ile or Met or Cys or Leu
  MISC_FEATURE (898)..(898): Absent or His or Lys or Glu or Asn or Ser
  MISC_FEATURE (899)..(899): Absent or Leu or Ala or Gln or Ile
  MISC_FEATURE (900)..(900): Absent or Val or Ile or Ser
  MISC_FEATURE (901)..(901): Absent or Ala
  MISC_FEATURE (902)..(902): Absent or Ser
  MISC_FEATURE (903)..(903): Absent or Asp
  MISC_FEATURE (904)..(904): Absent or Ala
  MISC_FEATURE (905)..(905): Absent or Ser
  MISC_FEATURE (906)..(906): Absent or Ala

SEQ ID NO: 17392 - protein, 757 aa, Artificial
  Consensus Sequence of SEQ ID NO. 197 and its homologs
  MISC_FEATURE (1)..(1): Absent or Met
  MISC_FEATURE (2)..(2): Absent or Ser
  MISC_FEATURE (3)..(3): Absent or Cys
  MISC_FEATURE (4)..(4): Absent or Glu
  MISC_FEATURE (5)..(5): Absent or Lys
  MISC_FEATURE (6)..(6): Absent or Val
  MISC_FEATURE (7)..(7): Absent or Met
  MISC_FEATURE (8)..(8): Absent or Glu
  MISC_FEATURE (9)..(9): Absent or Gly
  MISC_FEATURE (10)..(10): Absent or His
  MISC_FEATURE (11)..(11): Absent or Ala
  MISC_FEATURE (12)..(12): Absent or His
  MISC_FEATURE (13)..(13): Absent or Ile
  MISC_FEATURE (14)..(14): Absent or Pro
  MISC_FEATURE (15)..(15): Absent or Cys
  MISC_FEATURE (16)..(16): Absent or Leu
  MISC_FEATURE (17)..(17): Absent or Asp
  MISC_FEATURE (18)..(18): Absent or Glu
  MISC_FEATURE (19)..(19): Absent or Gln
  MISC_FEATURE (20)..(20): Absent or Ser
  MISC_FEATURE (21)..(21): Absent or Phe
  MISC_FEATURE (22)..(22): Absent or Val
  MISC_FEATURE (23)..(23): Absent or Lys
  MISC_FEATURE (24)..(24): Absent or Arg
  MISC_FEATURE (25)..(25): Absent or Gln
  MISC_FEATURE (26)..(26): Absent or Glu
  MISC_FEATURE (27)..(27): Absent or Ser
  MISC_FEATURE (28)..(28): Absent or Arg
  MISC_FEATURE (29)..(29): Absent or Arg
  MISC_FEATURE (30)..(30): Absent or Ile
  MISC_FEATURE (31)..(31): Absent or Thr
  MISC_FEATURE (32)..(32): Absent or Leu
  MISC_FEATURE (33)..(33): Absent or Thr
  MISC_FEATURE (34)..(34): Absent or His
  MISC_FEATURE (35)..(35): Absent or Ala
  MISC_FEATURE (36)..(36): Absent or Ile
  MISC_FEATURE (37)..(37): Absent or His
  MISC_FEATURE (38)..(38): Absent or Pro
  MISC_FEATURE (39)..(39): Absent or Pro
  MISC_FEATURE (40)..(40): Absent or Gly
  MISC_FEATURE (41)..(41): Absent or Arg
  MISC_FEATURE (42)..(42): Absent or Gly
  MISC_FEATURE (43)..(43): Absent or Ile
  MISC_FEATURE (44)..(44): Absent or Phe
  MISC_FEATURE (45)..(45): Absent or Ser
  MISC_FEATURE (46)..(46): Absent or Gln
  MISC_FEATURE (47)..(47): Absent or Cys
  MISC_FEATURE (48)..(48): Absent or Cys
  MISC_FEATURE (49)..(49): Absent or Gly
  MISC_FEATURE (50)..(50): Absent or Phe
  MISC_FEATURE (51)..(51): Absent or Gly
  MISC_FEATURE (52)..(52): Absent or Thr
  MISC_FEATURE (53)..(53): Absent or Cys
  MISC_FEATURE (54)..(54): Absent or Phe
  MISC_FEATURE (55)..(55): Absent or Gly
  MISC_FEATURE (56)..(56): Absent or Arg
  MISC_FEATURE (57)..(57): Absent or Ser
  MISC_FEATURE (58)..(58): Absent or Val
  MISC_FEATURE (59)..(59): Absent or Ser
  MISC_FEATURE (60)..(60): Absent or Met
  MISC_FEATURE (61)..(61): Absent or Leu
  MISC_FEATURE (62)..(62): Absent or Ser
  MISC_FEATURE (63)..(63): Absent or Cys
  MISC_FEATURE (64)..(64): Absent or Gly
  MISC_FEATURE (65)..(65): Absent or Arg
  MISC_FEATURE (66)..(66): Absent or Ile
  MISC_FEATURE (67)..(67): Absent or Pro
  MISC_FEATURE (68)..(68): Absent or Leu
  MISC_FEATURE (69)..(69): Absent or Leu
  MISC_FEATURE (70)..(70): Absent or Pro
  MISC_FEATURE (71)..(71): Absent or Ala
  MISC_FEATURE (72)..(72): Absent or Leu
  MISC_FEATURE (73)..(73): Absent or Ser
  MISC_FEATURE (74)..(74): Absent or Phe
  MISC_FEATURE (75)..(75): Absent or Leu
  MISC_FEATURE (76)..(76): Absent or Ile
  MISC_FEATURE (77)..(77): Absent or Cys
  MISC_FEATURE (78)..(78): Absent or Asn
  MISC_FEATURE (79)..(79): Absent or Ala
  MISC_FEATURE (80)..(80): Absent or Gly
  MISC_FEATURE (81)..(81): Absent or Cys
  MISC_FEATURE (82)..(82): Absent or Gly
  MISC_FEATURE (83)..(83): Absent or Ile
  MISC_FEATURE (84)..(84): Absent or Leu
  MISC_FEATURE (85)..(85): Absent or Lys
  MISC_FEATURE (86)..(86): Absent or Pro
  MISC_FEATURE (87)..(87): Absent or Ser
  MISC_FEATURE (88)..(88): Absent or Ala
  MISC_FEATURE (89)..(89): Absent or Ser
  MISC_FEATURE (90)..(90): Absent or Asp
  MISC_FEATURE (91)..(91): Absent or Leu
  MISC_FEATURE (92)..(92): Absent or Val
  MISC_FEATURE (93)..(93): Absent or Leu
  MISC_FEATURE (94)..(94): Absent or Phe
  MISC_FEATURE (95)..(95): Absent or Val
  MISC_FEATURE (96)..(96): Absent or Leu
  MISC_FEATURE (97)..(97): Absent or Gly
  MISC_FEATURE (98)..(98): Absent or Val
  MISC_FEATURE (99)..(99): Absent or Ala
  MISC_FEATURE (100)..(100): Absent or His
  MISC_FEATURE (101)..(101): Absent or Leu
  MISC_FEATURE (102)..(102): Absent or Val
  MISC_FEATURE (103)..(103): Absent or Arg
  MISC_FEATURE (104)..(104): Absent or Leu
  MISC_FEATURE (105)..(105): Absent or Cys
  MISC_FEATURE (106)..(106): Absent or Lys
  MISC_FEATURE (107)..(107): Absent or Cys
  MISC_FEATURE (108)..(108): Absent or Pro
  MISC_FEATURE (109)..(109): Absent or Phe
  MISC_FEATURE (110)..(110): Absent or Ser
  MISC_FEATURE (111)..(111): Absent or Gly
  MISC_FEATURE (112)..(112): Absent or Leu
  MISC_FEATURE (113)..(113): Absent or Val
  MISC_FEATURE (114)..(114): Absent or Ile
  MISC_FEATURE (115)..(115): Absent or Gln
  MISC_FEATURE (116)..(116): Absent or Arg
  MISC_FEATURE (117)..(117): Absent or Ala
  MISC_FEATURE (118)..(118): Absent or Cys
  MISC_FEATURE (119)..(119): Absent or Ala
  MISC_FEATURE (120)..(120): Absent or Val
  MISC_FEATURE (121)..(121): Absent or Ser
  MISC_FEATURE (122)..(122): Absent or Phe
  MISC_FEATURE (123)..(123): Absent or Thr
  MISC_FEATURE (124)..(124): Absent or Trp
  MISC_FEATURE (125)..(125): Absent or Phe or Trp
  MISC_FEATURE (126)..(126): Absent or Ile or Pro
  MISC_FEATURE (127)..(127): Absent or Phe or Asn
  MISC_FEATURE (128)..(128): Absent or Glu or Pro
  MISC_FEATURE (129)..(129): Absent or Trp or Ser
  MISC_FEATURE (130)..(130): Absent or Phe or Gln
  MISC_FEATURE (131)..(131): Absent or Lys or His
  MISC_FEATURE (132)..(132): Absent or Tyr or Thr
  MISC_FEATURE (133)..(133): Absent or Tyr or Asp
  MISC_FEATURE (134)..(134): Absent or Phe or Cys
  MISC_FEATURE (135)..(135): Absent or Leu or Ala
  MISC_FEATURE (136)..(136): Absent or Pro or His
  MISC_FEATURE (137)..(137): Absent or Met or His
  MISC_FEATURE (138)..(138): Absent or Ala or Ser
  MISC_FEATURE (139)..(139): Absent or Ser or Leu or Lys or Thr or Gly
  MISC_FEATURE (140)..(140): Absent or Asn or Thr or Ala or Pro or Ser or Phe or Gln or Arg
  MISC_FEATURE (141)..(141): Absent or Met or Val or Ala or Asn or Asp or Ile
  MISC_FEATURE (142)..(142): Absent or Tyr or Ser or Asn or Gly or Asp or Pro
  MISC_FEATURE (143)..(143): Absent or Gly or Lys or Ile or Ala
  MISC_FEATURE (144)..(144): Absent or Thr or Val or Arg or Phe or Ile or Leu
  MISC_FEATURE (145)..(145): Absent or Thr or Val or Ser or Tyr or Ile
  MISC_FEATURE (146)..(146): Absent or Val or Pro or Ser or Tyr or Thr or Ala
  MISC_FEATURE (147)..(147): Absent or Ala or Asn or Arg or Ser or Gly or Thr
  MISC_FEATURE (148)..(148): Absent or Cys or Ser or Pro or Ala or Thr
  MISC_FEATURE (149)..(149): Absent or Arg or Val or Phe or Ile or Thr or Gly
  MISC_FEATURE (150)..(150): Absent or Met or Ala or Val or Leu
  MISC_FEATURE (151)..(151): Absent or Cys or Thr or Leu or Tyr
  MISC_FEATURE (152)..(152): Absent or Tyr or Asp or Gln or Asn or Lys or Phe
  MISC_FEATURE (153)..(153): Absent or Arg or Ser or Asn
  MISC_FEATURE (154)..(154): Absent or Thr or Lys or Ala or Leu
  MISC_FEATURE (155)..(155): Absent or Ser or Leu or Thr or Ala
  MISC_FEATURE (156)..(156): Absent or Ile or Thr or Leu or Pro
  MISC_FEATURE (157)..(157): Absent or Ser or Cys or Leu
  MISC_FEATURE (158)..(158): Absent or Lys or Thr or Arg or Phe
  MISC_FEATURE (159)..(159): Absent or Ser or Pro or Asp
  MISC_FEATURE (160)..(160): Absent or Gln or His or Glu or Lys
  MISC_FEATURE (161)..(161): Absent or Gly or Glu or Leu or His or Tyr
  MISC_FEATURE (162)..(162): Absent or Thr or Ile or Lys or Met or Arg
  MISC_FEATURE (163)..(163): Absent or Ile or His or Leu or Met
  MISC_FEATURE (164)..(164): Absent or Ser or Cys or Tyr or Leu or Pro
  MISC_FEATURE (165)..(165): Absent or Ser or Ala or Cys
  MISC_FEATURE (166)..(166): Absent or Asp or Phe or Asn or Lys
  MISC_FEATURE (167)..(167): Absent or Gln or Ser or Leu
  MISC_FEATURE (168)..(168): Absent or Tyr or Pro or Lys or Ser or Val
  MISC_FEATURE (169)..(169): Absent or Arg or Ile or Ser or Asn or Ala or Gly
  MISC_FEATURE (170)..(170): Absent or Pro or Leu or Ile or Phe or Thr
  MISC_FEATURE (171)..(171): Absent or Pro or Val or Ala or Lys or Gln or Arg or Asp or His
  MISC_FEATURE (172)..(172): Absent or Pro or Lys or His or Ile or Glu or Cys
  MISC_FEATURE (173)..(173): Absent or Arg or Ser or Cys or Asn or Pro or Gln or Val or Met
  MISC_FEATURE (174)..(174): Absent or Asp or Val or Gly or Lys or Arg or Ala
  MISC_FEATURE (175)..(175): Absent or Phe or Asn or Ser or Leu or Ile or Val
  MISC_FEATURE (176)..(176): Absent or Thr or Ala or Val or His or Gln or Tyr or Asp or Asn
  MISC_FEATURE (177)..(177): Absent or Cys or Ser or Pro or Phe or Leu or Ala or Thr
  MISC_FEATURE (178)..(178): Absent or Glu or Arg or Lys or Thr or Ser or His or Leu or Ile
  MISC_FEATURE (179)..(179): Absent or Ala or Met or Ser or Asn or His or Lys or Arg or Thr or Pro
  MISC_FEATURE (180)..(180): Absent or Arg or Glu or Gln or Gly or His or Leu
  MISC_FEATURE (181)..(181): Absent or Lys or Asp or Arg or Ser or Gly or Val or Glu
  MISC_FEATURE (182)..(182): Absent or Ser or Ala or Val or Ile or Leu or Gly
  MISC_FEATURE (183)..(183): Absent or Glu or Leu or Lys
  MISC_FEATURE (184)..(184): Absent or Ala or Met or Leu or Asn or His or Gly or Val
  MISC_FEATURE (185)..(185): Absent or Arg or Ala or Thr or Gln or Gly or Ser or Phe
  MISC_FEATURE (186)..(186): Absent or Arg or Tyr or Gln or His or Thr or Glu or Lys
  MISC_FEATURE (187)..(187): Absent or Trp or Val or Gln or Leu or Lys or Cys
  MISC_FEATURE (188)..(188): Absent or Gly or His or Ser or Asn or Phe or Met
  MISC_FEATURE (189)..(189): Absent or Asn or His or Ser or Tyr or Lys or Thr
  MISC_FEATURE (190)..(190): Absent or Gly or Pro or Lys or Asp or Arg or Glu
  MISC_FEATURE (191)..(191): Absent or Tyr or Leu or His or Ser or Cys or Ala
  MISC_FEATURE (192)..(192): Absent or His or Glu or Ala or Pro or Leu or Val or Ser or Gln
  MISC_FEATURE (193)..(193): Absent or Leu or His or Phe or Ala or Ser or Pro
  MISC_FEATURE (194)..(194): Absent or Ile or Asn or Thr or Met or Leu
  MISC_FEATURE (195)..(195): Met or Absent or Pro or Lys or Ala or Glu or Gln or Leu or His or Ile or Phe
  MISC_FEATURE (196)..(196): Ser or Absent or Arg or Asn or Gly or Lys
  MISC_FEATURE (197)..(197): Glu or Absent or Leu or Ser or Tyr or Phe
  MISC_FEATURE (198)..(198): Glu or Absent or Cys or Ser or Arg or Ala or Thr or Lys or Phe
  MISC_FEATURE (199)..(199): Pro or Absent or Gln or Ile or Ala or Val or Phe or Leu or Met
  MISC_FEATURE (200)..(200): Ser or Absent or Trp or Glu or Phe
  MISC_FEATURE (201)..(201): Asn or Absent or Lys or Glu or Gly or Leu
  MISC_FEATURE (202)..(202): Lys or Absent or Pro or Ile or Leu or Glu or Asp or Ser
  MISC_FEATURE (203)..(203): Asn or Absent or Arg or His or Lys or Gly or Ser or Trp or Ala
  MISC_FEATURE (204)..(204): Glu or Absent or Gly or Asp or Gln or Phe or Leu or Ser or His or Asn
  MISC_FEATURE (205)..(205): Lys or Absent or Ser or Met or Gly or Trp or Gln or Arg or Thr
  MISC_FEATURE (206)..(206): Met or Absent or Lys or Leu or His or Gly or Phe or Arg or Glu or Gln
  MISC_FEATURE (207)..(207): Ser or Absent or Val or Cys or Ile or Phe or Ala or Leu or Thr
  MISC_FEATURE (208)..(208): Ser or Absent or Asp or Asn or Cys or His or Tyr or Arg or Thr
  MISC_FEATURE (209)..(209): Gly or Absent or Lys or Thr or Arg or Glu or Ala
  MISC_FEATURE (210)..(210): Glu or Absent or Ser or Met or Lys or Arg or Ala or Gln
  MISC_FEATURE (211)..(211): Arg or Absent or Leu or Val or Thr or Pro or Asn or Cys or Ser
  MISC_FEATURE (212)..(212): Val or Absent or Leu or Asp or Gly or Pro or Ser or Thr or Asn
  MISC_FEATURE (213)..(213): Pro or Absent or Gly or Ser or Thr or His or Val or Asn or Gln
  MISC_FEATURE (214)..(214): Leu or Absent or Asp or Phe or Tyr or Ser or Gly or Arg or Ile
  MISC_FEATURE (215)..(215): Trp or Absent or Gly or Val or Phe or Ile or Leu
  MISC_FEATURE (216)..(216): Glu or Absent or His or Thr or Ser or Ile or Ala or Met or Leu
  MISC_FEATURE (217)..(217): Lys or Absent or Gly
  MISC_FEATURE (218)..(218): His or Absent or Gly or Ser or Thr or Phe or Gln
  MISC_FEATURE (219)..(219): Lys or Absent or Arg or Glu or Ala or Gln
  MISC_FEATURE (220)..(220): Gly or Absent or Asp or Thr or Arg or Lys or Gln
  MISC_FEATURE (221)..(221): Lys or Absent or Ala or Gly or Ser or Pro or Gln
  MISC_FEATURE (222)..(222): Lys or Absent or Arg or Thr or Cys or Ser or Gly or Asn
  MISC_FEATURE (223)..(223): Glu or Absent or Cys or Thr or Ser or Pro or Val or Phe
  MISC_FEATURE (224)..(224): Glu or Absent or His or Asp or Thr or Val or Ile or Leu or Lys or Trp or Arg
  MISC_FEATURE (225)..(225): Ser or Absent or Arg or Leu or Val or Asp or Cys
  MISC_FEATURE (226)..(226): Tyr or Absent or Cys or Ile or Arg or His
  MISC_FEATURE (227)..(227): Gly or Absent or Ser or Phe or Trp or Gln or Lys or His or Arg
  MISC_FEATURE (228)..(228): Ser or Absent or Leu or Val or Gly or Tyr
  MISC_FEATURE (229)..(229): Ser or Absent or His or Glu or Gly or Thr or Ala or Lys
  MISC_FEATURE (230)..(230): Lys or Absent or Asn or Gly or Arg or Glu or Ser
  MISC_FEATURE (231)..(231): Ser or Absent or Asn or Pro or Thr or Ala or Arg or His
  MISC_FEATURE (232)..(232): His or Absent or Cys or Gly or Gln or Asn or Arg or Met or Ser
  MISC_FEATURE (233)..(233): Lys or Absent or Glu or Ile or Asp or Arg or Asn or His or Val or Ala or Ser
  MISC_FEATURE (234)..(234): Lys or Absent or Cys or Ala or Thr or Ile or Ser
  MISC_FEATURE (235)..(235): Asp or Absent or Glu or Leu or Gly
  MISC_FEATURE (236)..(236): Asp or Absent or Thr or Gly or Ala or Glu or Gln or Val
  MISC_FEATURE (237)..(237): Lys or Absent or Arg or Leu or Glu or Gly
  MISC_FEATURE (238)..(238): Absent or Asp or Gln or Glu or Arg or Cys
  MISC_FEATURE (239)..(239): Absent or Cys or Ser or Arg or Phe
  MISC_FEATURE (240)..(240): Absent or Asp or Val or Thr or Ile or Pro or Ser or Phe or Asn
  MISC_FEATURE (241)..(241): Absent or Ala or Glu or Arg or Thr or Pro or Ile or Leu
  MISC_FEATURE (242)..(242): Absent or Met or Pro
  MISC_FEATURE (243)..(243): Absent or Glu
  MISC_FEATURE (244)..(244): Absent or Asp or Tyr
  MISC_FEATURE (245)..(245): Absent or Ala or Cys or Gly
  MISC_FEATURE (246)..(246): Absent or Ala or Thr
  MISC_FEATURE (247)..(247): Absent or Ala or Asn or Asp
  MISC_FEATURE (248)..(248): Absent or Ser
  MISC_FEATURE (249)..(249): Absent or Ser or Pro or His or Thr or Glu or Asn or Met
  MISC_FEATURE (250)..(250): Absent or Tyr or His or Asn or Ser or Lys
  MISC_FEATURE (251)..(251): Absent or Arg or Glu or Ser or Asp or Gly
  MISC_FEATURE (252)..(252): Absent or Asp
  MISC_FEATURE (253)..(253): Absent or Phe or Cys or Arg or Ser or Val or Tyr or Ala
  MISC_FEATURE (254)..(254): Absent or Lys or Leu or Ser or Asp or Glu
  MISC_FEATURE (255)..(255): Absent or Gln or Asp or Asn or Val or Glu
  MISC_FEATURE (256)..(256): Absent or His or Leu or Ile or Ser or Thr or Asp
  MISC_FEATURE (257)..(257): Absent or Ser or Pro or Thr or Glu
  MISC_FEATURE (258)..(258): Absent or Arg or Asn or Ser or Lys
  MISC_FEATURE (259)..(259): Absent or Gly or Ser or Val or Ala or Arg or Met
  MISC_FEATURE (260)..(260): Absent or Asn or Ser or Gln or Lys or His or Cys or Met or Ala
  MISC_FEATURE (261)..(261): Absent or Pro or Met or Phe or Val or Thr or Leu or Ala or Gly or Ser
  MISC_FEATURE (262)..(262): Lys or Absent or Gln or Val or Phe or Glu or Gly or Met or His
  MISC_FEATURE (263)..(263): Lys or Absent or Phe or Leu or Pro or Gln or Asp or Glu or Ser
  MISC_FEATURE (264)..(264): Lys or Absent or Ser or Ala or Gly or Glu or Asp
  MISC_FEATURE (265)..(265): Arg or Absent or Asp or Leu or Glu or Lys or His
  MISC_FEATURE (266)..(266): Met or Absent or Asp or Asn or Ser or Val or Gly or Pro or Ala or Lys
  MISC_FEATURE (267)..(267): Lys or Absent or Gln or Ser or Glu or Asp or Ala or Ile or Thr
  MISC_FEATURE (268)..(268): Lys or Absent or Val or Ala or Ser or Asn or His or Arg or Thr
  MISC_FEATURE (269)..(269): Val or Absent or Ser or Asp or Gln or Glu or Leu or Ala or Thr
  MISC_FEATURE (270)..(270): Arg or Absent or Ser or Leu or Ala or Val or Gly or Pro
  MISC_FEATURE (271)..(271): Ser or Absent or Lys or Ile or Met or Val or Leu or Gln
  MISC_FEATURE (272)..(272): Pro or Absent or Asn or Ser or Glu or Lys
  MISC_FEATURE (273)..(273): Absent or Lys or Glu or Gly or Ala
  MISC_FEATURE (274)..(274): Absent or Arg
  MISC_FEATURE (275)..(275): Absent or Asn
  MISC_FEATURE (276)..(276): Absent or Val
  MISC_FEATURE (277)..(277): Absent or Gly
  MISC_FEATURE (278)..(278): Absent or Gly
  MISC_FEATURE (279)..(279): Absent or Ser or His or Ala or Arg or Ile or Thr or Val or Pro
  MISC_FEATURE (280)..(280): Absent or Ala or Pro or Ile or Arg or Ser or Gly or Leu or Val
  MISC_FEATURE (281)..(281): Absent or Tyr or Asp or Glu or Lys or His or Thr or Pro
  MISC_FEATURE (282)..(282): Absent or Ala or Pro or Glu or Ser
  MISC_FEATURE (283)..(283): Absent or Ser or Ala or Asn or Cys or Val or Thr
  MISC_FEATURE (284)..(284): Absent or Gln or Tyr or Asn or His or Arg or Pro
  MISC_FEATURE (285)..(285): Absent or Gly or Lys or Ser or Ala or Cys
  MISC_FEATURE (286)..(286): Absent or Leu or Ser or Ile or Ala
  MISC_FEATURE (287)..(287): Absent or Ala or Met or Gln or Ser or Phe
  MISC_FEATURE (288)..(288): Thr or Absent or Glu or Ala or Leu or Val or Asp or Asn or Lys
  MISC_FEATURE (289)..(289): Leu or Absent or Ala or Ser or Asp
  MISC_FEATURE (290)..(290): Ala or Absent or Cys or Val or Tyr
  MISC_FEATURE (291)..(291): Ser or Absent or Lys or Leu or Glu or Arg or Met or Gln
  MISC_FEATURE (292)..(292): Leu or Absent or Phe or Ser or Tyr
  MISC_FEATURE (293)..(293): Pro or Absent or Val or Glu or Ala or Met
  MISC_FEATURE (294)..(294): Arg or Absent or Tyr or Ala or Ser or Cys
  MISC_FEATURE (300)..(300): Ala or Absent or Val or Thr or Leu or Ile
  MISC_FEATURE (301)..(301): Pro or Absent or Asn or Asp
  MISC_FEATURE (305)..(305): Ala or Absent or Gln or Arg or Lys
  MISC_FEATURE (306)..(306): Ala or Absent or Asn or Gln or Glu or Ser
  MISC_FEATURE (308)..(308): Pro or Absent or Ile or Leu or Phe or Met
  MISC_FEATURE (309)..(309): Leu or Absent or Gln or Glu or Val or Ile or His
  MISC_FEATURE (314)..(314): Ala or Absent or Gly or Thr or Glu or Gln
  MISC_FEATURE (316)..(316): Pro or Absent or Thr or Ile or Met or Val or Ser or Leu
  MISC_FEATURE (319)..(319): Glu or Absent or Asn or Asp
  MISC_FEATURE (320)..(320): Leu or Absent or Lys or Ala or Glu or Met or Arg
  MISC_FEATURE (323)..(323): Gly or Absent or Cys or Arg or Ser
  MISC_FEATURE (324)..(324): Met or Absent or Gln or Lys or Glu
  MISC_FEATURE (328)..(328): Pro or Absent or Val or Ser or Ile or Phe or Leu
  MISC_FEATURE (331)..(331): Arg or Absent or Leu or Ser or Thr
  MISC_FEATURE (332)..(332): Val or Absent or Gly or Glu
  MISC_FEATURE (337)..(337): Ser or Absent or Asp
  MISC_FEATURE (338)..(338): Absent or Asp
  MISC_FEATURE (339)..(339): Absent or Cys
  MISC_FEATURE (340)..(340): Absent or Leu
  MISC_FEATURE (341)..(341): Ser or Absent or Lys or Asp
  MISC_FEATURE (346)..(346): Arg or Absent or Lys or Val or Glu
  MISC_FEATURE (349)..(349): Gln or Absent or Arg or Glu or Val or Leu or Lys
  MISC_FEATURE (351)..(351): Ala or Absent or Ile or Val or Leu
  MISC_FEATURE (353)..(353): Lys or Absent or His or Ala or Arg or Asn or Thr
  MISC_FEATURE (354)..(354): Thr or Absent or Asn or Asp or Gly or Gln or Ser
  MISC_FEATURE (355)..(355): Ser or Absent or Val or Ala
  MISC_FEATURE (356)..(356): Leu or Absent or Lys or Arg
  MISC_FEATURE (357)..(357): Val or Absent or Glu or Ala or Arg or Lys or Gln
  MISC_FEATURE (358)..(358): Arg or Absent or Ala or Lys or Asp
  MISC_FEATURE (360)..(360): Arg or Absent or Ala or Pro or Glu or Lys or Ser or Met or Leu or Cys
  MISC_FEATURE (363)..(363): Val or Absent or Asn or Trp or His or Ser or Arg or Thr or Cys
  MISC_FEATURE (365)..(365): Met or Absent or Phe or Leu or Ile or Val or His
  MISC_FEATURE (367)..(367): Thr or Absent or Arg or Leu or Gln
  MISC_FEATURE (368)..(368): Ala or Absent or Ile or Gly
  MISC_FEATURE (369)..(369): Ala or Absent or Phe or Leu or Ile
  MISC_FEATURE (371)..(371): Ala or Absent or Glu or Asn or Asp
  MISC_FEATURE (372)..(372): Ala or Absent or Arg or Ile or Lys or Thr or Ser or Gln
  MISC_FEATURE (374)..(374): Ala or Absent or Gln or Met or Glu or Ser or His
  MISC_FEATURE (375)..(375): Gly or Absent or Ser or Thr or Met
  MISC_FEATURE (376)..(376): Ala or Absent or Asp or Lys or Arg or Gly or Glu
  MISC_FEATURE (379)..(379): Ser or Absent or Lys or Arg or Asn or Thr
  MISC_FEATURE (383)..(383): Gly or Absent or Lys or Ala or Asp or Glu or Arg or Gln
  MISC_FEATURE (391)..(391): Absent or Asp
  MISC_FEATURE (392)..(392): Absent or Val
  MISC_FEATURE (393)..(393): Absent or Gly
  MISC_FEATURE (394)..(394): Absent or Ser
  MISC_FEATURE (395)..(395): Absent or Ser
  MISC_FEATURE (396)..(396): Absent or Leu
  MISC_FEATURE (397)..(397): Absent or Leu
  MISC_FEATURE (398)..(398): Absent or Ser
  MISC_FEATURE (399)..(399): Absent or Phe
  MISC_FEATURE (400)..(400): Absent or Asn
  MISC_FEATURE (401)..(401): Absent or Cys
  MISC_FEATURE (402)..(402): Absent or Leu
  MISC_FEATURE (403)..(403): Absent or Ala
  MISC_FEATURE (404)..(404): Absent or Ser
  MISC_FEATURE (405)..(405): Absent or Leu
  MISC_FEATURE (406)..(406): Absent or Val
  MISC_FEATURE (407)..(407): Absent or Leu
  MISC_FEATURE (408)..(408): Absent or Leu
  MISC_FEATURE (409)..(409): Absent or Leu
  MISC_FEATURE (415)..(415): Ser or Absent or Arg or Leu or any naturally occurring amino acid
  MISC_FEATURE (418)..(418): Arg or Absent or Leu or Ser or Asn or Phe or Met
  MISC_FEATURE (419)..(419): Gly or Absent or Val or Ala or Arg or Cys
  MISC_FEATURE (420)..(420): Leu or Absent or Val or Ala or Gly
  MISC_FEATURE (421)..(421): Asp or Absent or Lys or His or Arg
  MISC_FEATURE (422)..(422): Leu or Absent or Arg or Lys or Gln or Glu
  MISC_FEATURE (428)..(428): Ile or Absent or Ala or Glu or Pro or Ser or Leu
  MISC_FEATURE (429)..(429): Cys or Absent or Phe or Gly or Leu or Tyr
  MISC_FEATURE (433)..(433): Absent or Lys
  MISC_FEATURE (434)..(434): Absent or Ile
  MISC_FEATURE (435)..(435): Absent or Leu
  MISC_FEATURE (436)..(436): Absent or Ser
  MISC_FEATURE (437)..(437): Absent or Ser
  MISC_FEATURE (438)..(438): Absent or Ser
  MISC_FEATURE (439)..(439): Absent or Lys
  MISC_FEATURE (440)..(440): Absent or Pro
  MISC_FEATURE (441)..(441): Absent or Ser
  MISC_FEATURE (442)..(442): Absent or Leu
  MISC_FEATURE (443)..(443): Absent or Trp
  MISC_FEATURE (444)..(444): Absent or Cys
  MISC_FEATURE (445)..(445): Absent or Gly
  MISC_FEATURE (446)..(446): Absent or Gly
  MISC_FEATURE (447)..(447): Absent or Gln
  MISC_FEATURE (448)..(448): Absent or Asn
  MISC_FEATURE (449)..(449): Absent or Val
  MISC_FEATURE (450)..(450): Absent or Gly
  MISC_FEATURE (451)..(451): Absent or Val
  MISC_FEATURE (452)..(452): Absent or Thr
  MISC_FEATURE (453)..(453): Absent or Met
  MISC_FEATURE (454)..(454): Absent or Cys
  MISC_FEATURE (455)..(455): Absent or Gly
  MISC_FEATURE (456)..(456): Absent or Arg
  MISC_FEATURE (457)..(457): Absent or Glu
  MISC_FEATURE (458)..(458): Absent or Pro
  MISC_FEATURE (459)..(459): Absent or Asn
  MISC_FEATURE (460)..(460): Absent or Met
  MISC_FEATURE (461)..(461): Absent or Pro
  MISC_FEATURE (462)..(462): Absent or Tyr
  MISC_FEATURE (463)..(463): Absent or Ile
  MISC_FEATURE (464)..(464): Absent or Ile
  MISC_FEATURE (465)..(465): Absent or Thr
  MISC_FEATURE (466)..(466): Absent or Pro
  MISC_FEATURE (467)..(467): Absent or Glu
  MISC_FEATURE (468)..(468): Absent or Val
  MISC_FEATURE (469)..(469): Absent or Ile
  MISC_FEATURE (470)..(470): Absent or Gln
  MISC_FEATURE (471)..(471): Absent or Arg
  MISC_FEATURE (472)..(472): Absent or Asn
  MISC_FEATURE (473)..(473): Absent or Met
  MISC_FEATURE (474)..(474): Absent or Pro
  MISC_FEATURE (475)..(475): Absent or Thr
  MISC_FEATURE (476)..(476): Absent or Ser
  MISC_FEATURE (477)..(477): Absent or Lys or Arg or Glu or Ser or Gln or Leu
  MISC_FEATURE (478)..(478): Absent or Phe or Leu or Pro or Ala or Val
  MISC_FEATURE (479)..(479): Absent or Val or Thr or Met or Ile or Leu
  MISC_FEATURE (480)..(480): Absent or Gln or Asn or Met or Lys or Arg
  MISC_FEATURE (481)..(481): Absent or Asp or Pro or Asn or Ser
  MISC_FEATURE (482)..(482): Absent or Ile or Asn or Phe or Val
  MISC_FEATURE (485)..(485): Absent or Met or Pro or Leu or Arg or Ala
  MISC_FEATURE (486)..(486): Absent or Met or Asn or Leu
  MISC_FEATURE (487)..(487): Absent or Val or Asp or Ala
  MISC_FEATURE (488)..(488): Absent or Asn or Asp or Gln or Ser or Gly or Arg or Thr
  MISC_FEATURE (489)..(489): Absent or Arg or Asp or Lys or Thr
  MISC_FEATURE (490)..(490): Absent or Leu or Asp or Met or Thr
  MISC_FEATURE (491)..(491): Absent or Tyr or His or Cys or Lys or Arg or Gln
  MISC_FEATURE (492)..(492): Absent or Glu or Lys or Asn or Ile or Val or Thr or Tyr
  MISC_FEATURE (493)..(493): Absent or Gln or Phe or Arg
  MISC_FEATURE (494)..(494): Absent or Leu or Pro or Ser or Phe
  MISC_FEATURE (495)..(495): Absent or Pro or Leu or Ile or Asn
  MISC_FEATURE (496)..(496): Absent or Arg or Phe or Lys
  MISC_FEATURE (497)..(497): Absent or Val or Leu or Lys or Arg or Pro or Ala
  MISC_FEATURE (498)..(498): Absent or Lys or Asp or Glu or Ala
  MISC_FEATURE (499)..(499): Absent or Asp or Ser or Lys or Glu or Arg or Gln
  MISC_FEATURE (500)..(500): Absent or Gly or Leu or Ser or Val
  MISC_FEATURE (501)..(501): Absent or Ser or Val or Leu or Thr or Asp
  MISC_FEATURE (502)..(502): Absent or Ser or Glu or Thr or Pro or Leu or Val or Ala
  MISC_FEATURE (503)..(503): Absent or Ser or Asp or Thr or Asn or Ala or Gly
  MISC_FEATURE (504)..(504): Absent or Arg or Gly or Glu or Ser or Ala or Pro or Lys
  MISC_FEATURE (505)..(505): Absent or Thr or Pro or Asn or Ser or Gln or Val or Asp or Ala
  MISC_FEATURE (506)..(506): Absent or Asn or Ser or Gly or Asp or Lys or Glu
  MISC_FEATURE (507)..(507): Absent or Ser or Ala or Asp or Thr or Ile or Val or Met or Lys
  MISC_FEATURE (508)..(508): Absent or Thr or His or Leu or Met or Arg or Asn or Ser or Glu
  MISC_FEATURE (509)..(509): Absent or Gly or Asp or Glu or Arg or Val or Ser
  MISC_FEATURE (510)..(510): Ser or Absent or Phe or Glu or Arg or His or Asn or Gly
  MISC_FEATURE (512)..(512): Gln or Absent or Thr or Ser or Met or Leu or Ala
  MISC_FEATURE (518)..(518): Phe or Absent or Lys or Ile or Arg or Trp or Asn
  MISC_FEATURE (519)..(519): Thr or Absent or Ala or Met or Arg or Ile
  MISC_FEATURE (520)..(520): Pro or Absent or Leu or Thr or Ala or Ser or Phe
  MISC_FEATURE (521)..(521): Phe or Absent or Glu or Gly or Asp or Asn or Tyr or Lys
  MISC_FEATURE (522)..(522): Leu or Absent or Phe or Ser or Gln
  MISC_FEATURE (523)..(523): Thr or Absent or Phe or Leu or Arg
  MISC_FEATURE (525)..(525): Glu or Absent or Gly or Pro or Ser or Ile or Arg or His
  MISC_FEATURE (526)..(526): Ser or Absent or Glu or Asp or Thr or Asn
  MISC_FEATURE (528)..(528): Leu or Absent or Ser or Thr or Met
  MISC_FEATURE (529)..(529): Arg or Absent or Ala or Ser or Thr or Lys or Pro
  MISC_FEATURE (530)..(530): Pro or Absent or Asp or Glu or Thr
  MISC_FEATURE (531)..(531): Trp or Absent or Gln or Arg or Gly
  MISC_FEATURE (533)..(533): Leu or Absent or Tyr or Ser or Thr or Ala or Gly or Val
  MISC_FEATURE (535)..(535): Leu or Absent or Ile or Phe
  MISC_FEATURE (536)..(536): Glu or Absent or Gln
  MISC_FEATURE (537)..(537): Glu or Absent or Asp or Gln
  MISC_FEATURE (540)..(540): Gln or Absent or Lys or Leu or Trp
  MISC_FEATURE (541)..(541): Arg or Absent or Ser or Asp or Lys or Asn
  MISC_FEATURE (556)..(556): Absent or any naturally occurring amino acid
  MISC_FEATURE (566)..(566): Absent or Ala or Thr or Arg
  MISC_FEATURE (567)..(567): Absent or Thr or Ala
  MISC_FEATURE (569)..(569): Absent or any naturally occurring amino acid
  MISC_FEATURE (579)..(579): Val or Absent or Arg or Ser or Gly or Gln or Lys
  MISC_FEATURE (581)..(581): His or Absent or Val or Ala
  MISC_FEATURE (584)..(584): Thr or Absent or Ile or Leu or Val
  MISC_FEATURE (585)..(585): Leu or Absent or Ala or Thr or Val
  MISC_FEATURE (594)..(594): Ser or Absent or Asn or Ala
  MISC_FEATURE (597)..(597): His or Lys or Absent or Gln or Arg or Leu
  MISC_FEATURE (605)..(605): Absent or Thr or Ala or Asp
  MISC_FEATURE (623)..(623): Absent or Asp
  MISC_FEATURE (624)..(624): Absent or Asp
  MISC_FEATURE (625)..(625): Absent or Tyr
  MISC_FEATURE (626)..(626): Absent or Asn
  MISC_FEATURE (629)..(629): Gln or Absent or Glu or Met or Thr
  MISC_FEATURE (631)..(631): Pro or Absent or Ser or Lys or Val or Thr or Asp
  MISC_FEATURE (633)..(633): Tyr or Absent or Pro or Trp or Leu
  MISC_FEATURE (635)..(635): Val or Absent or Ile or Ser or Arg
  MISC_FEATURE (637)..(637): Arg or Absent or Ala or Val or Asn or Ile or Thr or Cys or Ser
  MISC_FEATURE (640)..(640): Ser or Absent or Phe or Glu or Thr or Ala
  MISC_FEATURE (641)..(641): Arg or Ser or Absent or Lys or Tyr or Asn
  MISC_FEATURE (644)..(644): Asn or Asp or Absent or Tyr or His or Gln or Leu or Gly
  MISC_FEATURE (645)..(645): Glu or Absent or Ala or Arg or His
  MISC_FEATURE (647)..(647): Lys or Absent or Arg or Thr
  MISC_FEATURE (652)..(652): Leu or Absent or Val or Ile or Gln
  MISC_FEATURE (653)..(653): Glu or Absent or Gln or Ser or Gly or Pro
  MISC_FEATURE (658)..(658): Leu or Absent or Trp or Phe or Gly
  MISC_FEATURE (659)..(659): Arg or Absent or Pro or Gln or Ser
  MISC_FEATURE (660)..(660): Phe or Absent or Ile or Leu or Tyr or Ala
  MISC_FEATURE (661)..(661): Val or Absent or Met or Thr or Leu or Glu or Arg or Ser or Lys
  MISC_FEATURE (662)..(662): Met or Absent or Val or Gln or Leu
  MISC_FEATURE (663)..(663): Asn or Absent or Gly or Asp or His or Glu or Ser or Pro
  MISC_FEATURE (664)..(664): Absent or His
  MISC_FEATURE (665)..(665): Absent or Phe
  MISC_FEATURE (666)..(666): Absent or Ala
  MISC_FEATURE (667)..(667): Absent or Pro
  MISC_FEATURE (668)..(668): Absent or Ile
  MISC_FEATURE (669)..(669): Absent or Trp
  MISC_FEATURE (670)..(670): Absent or Val
  MISC_FEATURE (671)..(671): Absent or Ala
  MISC_FEATURE (672)..(672): Absent or Leu
  MISC_FEATURE (673)..(673): Absent or Ile
  MISC_FEATURE (674)..(674): Absent or Ser
  MISC_FEATURE (675)..(675): Absent or Ala
  MISC_FEATURE (676)..(676): Absent or Met
  MISC_FEATURE (677)..(677): Absent or Ser
  MISC_FEATURE (678)..(678): Absent or Thr
  MISC_FEATURE (679)..(679): Absent or His
  MISC_FEATURE (680)..(680): Absent or Phe or Gln or Glu or Gly or Ile or Thr
  MISC_FEATURE (681)..(681): Gln or Absent or Glu or Lys or Ser or Asn or Asp
  MISC_FEATURE (682)..(682): Asn or Absent or Arg or Thr or Pro or Ser or Asp or Lys
  MISC_FEATURE (683)..(683): Leu or Absent or Pro or Met or Val or Lys or Ala or Gln or Glu
  MISC_FEATURE (684)..(684): Ala or Absent or Asn or Lys or Glu or Ile or Asp or Ser or Gln or Gly or Val
  MISC_FEATURE (685)..(685): Ser or Absent or Asp or Glu or Thr or Ile
  MISC_FEATURE (686)..(686): Gly or Glu or Arg or Absent or Asp or Ala or Val or Asn or Lys or Pro
  MISC_FEATURE (687)..(687): Asp or Absent or Glu or Gly or Arg or Val
  MISC_FEATURE (688)..(688): Thr or Absent or Asp or Ser or Met or Lys
  MISC_FEATURE (689)..(689): Asp or Glu or Absent or Val or Gln or Ile or Gly or Ala
  MISC_FEATURE (690)..(690): Asp or Gly or Absent or Glu or Phe or Leu or Ser or Asn
  MISC_FEATURE (691)..(691): Asp or Absent or Ser or Ile or Val
  MISC_FEATURE (692)..(692): Asn or Asp or Absent or Thr or Ser or Phe
  MISC_FEATURE (693)..(693): Ser or Asn or Absent or Leu or Asp or Gly or Ala
  MISC_FEATURE (694)..(694): Val or Ser or Pro or Absent or Asp or Glu or Phe or Gln or Ala
  MISC_FEATURE (695)..(695): Ala or Absent or Glu or Asp or Leu
  MISC_FEATURE (696)..(696): Asp or Ala or Absent or Ile or Thr or Tyr
  MISC_FEATURE (697)..(697): Asp or Absent or Thr or Lys or Met
  MISC_FEATURE (698)..(698): Ala or Asp or Absent or Gly or Gln or Thr
  MISC_FEATURE (699)..(699): Ser or Asp or Ala or Absent or Val or Arg
  MISC_FEATURE (700)..(700): Absent or Thr or Ser
  MISC_FEATURE (701)..(701): Absent or Phe
  MISC_FEATURE (702)..(702): Absent or His
  MISC_FEATURE (703)..(703): Absent or Glu
  MISC_FEATURE (704)..(704): Absent or Val
  MISC_FEATURE (705)..(705): Absent or Glu
  MISC_FEATURE (706)..(706): Absent or Thr
  MISC_FEATURE (707)..(707): Absent or Ala
  MISC_FEATURE (708)..(708): Absent or Ala
  MISC_FEATURE (709)..(709): Absent or Lys
  MISC_FEATURE (710)..(710): Absent or His
  MISC_FEATURE (711)..(711): Absent or Leu
  MISC_FEATURE (712)..(712): Absent or Ser
  MISC_FEATURE (713)..(713): Absent or Met
  MISC_FEATURE (714)..(714): Absent or Val
  MISC_FEATURE (715)..(715): Absent or Leu
  MISC_FEATURE (716)..(716): Absent or Gln
  MISC_FEATURE (717)..(717): Absent or Thr
  MISC_FEATURE (718)..(718): Absent or Phe
  MISC_FEATURE (719)..(719): Absent or Glu
  MISC_FEATURE (720)..(720): Absent or Leu
  MISC_FEATURE (721)..(721): Absent or Glu
  MISC_FEATURE (722)..(722): Absent or Leu
  MISC_FEATURE (723)..(723): Absent or Cys
  MISC_FEATURE (724)..(724): Absent or His
  MISC_FEATURE (725)..(725): Absent or Asn
  MISC_FEATURE (726)..(726): Absent or Tyr
  MISC_FEATURE (727)..(727): Absent or Ser
  MISC_FEATURE (728)..(728): Absent or Ile
  MISC_FEATURE (729)..(729): Absent or Ser
  MISC_FEATURE (730)..(730): Absent or Ile
  MISC_FEATURE (731)..(731): Absent or Ser
  MISC_FEATURE (732)..(732): Absent or Glu
  MISC_FEATURE (733)..(733): Absent or Val
  MISC_FEATURE (734)..(734): Absent or Leu
  MISC_FEATURE (735)..(735): Absent or Ile
  MISC_FEATURE (736)..(736): Absent or Ser
  MISC_FEATURE (737)..(737): Absent or Asp
  MISC_FEATURE (738)..(738): Absent or His
  MISC_FEATURE (739)..(739): Absent or Val
  MISC_FEATURE (740)..(740): Absent or Thr
  MISC_FEATURE (741)..(741): Absent or Leu
  MISC_FEATURE (742)..(742): Absent or Asp
  MISC_FEATURE (743)..(743): Absent or Leu
  MISC_FEATURE (744)..(744): Absent or Val
  MISC_FEATURE (745)..(745): Absent or Ile
  MISC_FEATURE (746)..(746): Absent or Glu
  MISC_FEATURE (747)..(747): Absent or Leu
  MISC_FEATURE (748)..(748): Absent or Ala
  MISC_FEATURE (749)..(749): Absent or Thr
  MISC_FEATURE (750)..(750): Absent or Gln
  MISC_FEATURE (751)..(751): Absent or Glu
  MISC_FEATURE (752)..(752): Absent or Leu
  MISC_FEATURE (753)..(753): Absent or Glu
  MISC_FEATURE (754)..(754): Absent or Lys
  MISC_FEATURE (755)..(755): Absent or Thr
  MISC_FEATURE (756)..(756): Absent or Ala
  MISC_FEATURE (757)..(757): Absent or Ile
XXXXXXXXXXXXXXXXXXXXXXXXXXXXXXXXXXXXXXXXXXXXXXXXXXXXXXXXXXXXXXXXXXXXXXXXXXXXXXXXXXXXXXXXXXXXXXXXXXXXXXXXXXXXXXXXXXXXXXXXXXXXXXXXXXXXXXXXXXXXXXXXXXXXXXXXXXXXXXXXXXXXXXXXXXXXXXXXXXXXXXXXXXXXXXXXXXXXXXXXXXXXXXXXXXXXXXXXXXXXXXXXXXXXXXXXXXXXXXXXXXXXXXXXXXXXXXXXXXXXXXXXXXXXXXXXXXXXXXXXXXXXXXXXXXXXXXNDAKFXXERAXXDXXLLSRXIXRLXXRAXXDVAXLGXXFLKLXXXXXARARXDTXKXDXXXXXXAXRLXHXAXXXKXXAXXXLKXAADXHWSDGALXXXXXXXXXXXXXXXXXXXEADLRXADXXXXXRAMEDXXMALXXXXXXXXXXXXXXXXXXXXXXXXXXXXXXXXXXXXXXXXXXXXXXXXXXHDXXXXXXXXXXXXXXXXXXXXXXXXXXIXLEKNGXXXXXXPXXVXXXXIXAXXXAYXXMASALSEADGIDYTXDPEELELLVXXLXIDLDAMDGKXSXSLXXECSSSPDVXTRXALANALAXAPSMWTLGNAGMGALQRXXXXLAXDXNXAXAXAAXXAIXXLXKQWEXXEGDSXXXXXXXXXXXXXXXXXXXXXXXXXXXXXXXXXXXXXXXXXXXXXXXXXXXXXXXXXXXXXXXXXXXXXXXXXXXXXXXXXXXXXXXXXXXXXXXXXXXX

SEQ ID NO: 17393 - protein, 2014 aa, Artificial
  Consensus Sequence of Seq ID No. 203 and its homologs
  MISC_FEATURE (1)..(1): Absent or Met
  MISC_FEATURE (2)..(2): Absent or Thr
  MISC_FEATURE (3)..(3): Absent or Gly
  MISC_FEATURE (4)..(4): Absent or Ala
  MISC_FEATURE (5)..(5): Absent or Met or Thr
  MISC_FEATURE (6)..(6): Absent or Ser or Met
  MISC_FEATURE (7)..(7): Absent or Met or Thr or Asp
  MISC_FEATURE (8)..(8): Absent or Gly or Pro or Ala
  MISC_FEATURE (9)..(9): Absent or Asn or Ala
  MISC_FEATURE (10)..(10): Absent or Leu or Lys
  MISC_FEATURE (11)..(11): Absent or Thr or Ser or Arg
  MISC_FEATURE (12)..(12): Absent or Leu or Pro
  MISC_FEATURE (13)..(13): Absent or Asp or Gln or Glu
  MISC_FEATURE (14)..(14): Absent or Glu or Leu
  MISC_FEATURE (15)..(15): Absent or Tyr or Ile or Cys
  MISC_FEATURE (16)..(16): Absent or Tyr or Thr or Lys
  MISC_FEATURE (17)..(17): Absent or Glu
  MISC_FEATURE (18)..(18): Absent or Ile or Leu
  MISC_FEATURE (19)..(19): Absent or Gln
  MISC_FEATURE (20)..(20): Absent or Gln or Arg or Glu
  MISC_FEATURE (21)..(21): Absent or Asn or Thr
  MISC_FEATURE (22)..(22): Absent or Glu
  MISC_FEATURE (23)..(23): Absent or Leu or Ile
  MISC_FEATURE (24)..(24): Absent or Glu
  MISC_FEATURE (25)..(25): Absent or Ala
  MISC_FEATURE (26)..(26): Absent or Met or Ile or Leu
  MISC_FEATURE (27)..(27): Absent or Glu or Lys
  MISC_FEATURE (28)..(28): Absent or Ser or Ala
  MISC_FEATURE (29)..(29): Absent or Ile
  MISC_FEATURE (30)..(30): Absent or Tyr or Leu or Phe
  MISC_FEATURE (31)..(31): Absent or Ala or Asp or Met
  MISC_FEATURE (32)..(32): Absent or Gly or Gln or Asp
  MISC_FEATURE (33)..(33): Absent or Asp
  MISC_FEATURE (34)..(34): Absent or Phe
  MISC_FEATURE (35)..(35): Absent or Val or Thr or Glu
  MISC_FEATURE (36)..(36): Absent or Asp or Arg or Glu
  MISC_FEATURE (37)..(37): Absent or Leu or Val
  MISC_FEATURE (38)..(38): Absent or Thr or Glu or Lys
  MISC_FEATURE (39)..(39): Absent or Gln or Val
  MISC_FEATURE (40)..(40): Absent or Arg or Lys
  MISC_FEATURE (41)..(41): Absent or Lys or Ala or Asn
  MISC_FEATURE (42)..(42): Absent or Ala or Trp
  MISC_FEATURE (43)..(43): Absent or Ser or Lys or Trp
  MISC_FEATURE (44)..(44): Absent or Trp or Gly or Asn
  MISC_FEATURE (45)..(45): Absent or Asp or Ala or Val
  MISC_FEATURE (46)..(46): Absent or Lys or Ala or Thr
  MISC_FEATURE (47)..(47): Absent or Lys or Val or Asn
  MISC_FEATURE (48)..(48): Absent or Pro or Ser or Gly
  MISC_FEATURE (49)..(49): Absent or Gln or His
  MISC_FEATURE (50)..(50): Absent or Arg or Leu or Val
  MISC_FEATURE (51)..(51): Absent or Val or His or Tyr
  MISC_FEATURE (52)..(52): Absent or Phe or Glu or Cys
  MISC_FEATURE (53)..(53): Absent or Glu or Phe or Ile
  MISC_FEATURE (54)..(54): Absent or Ile or Gln or His
  MISC_FEATURE (55)..(55): Absent or Ser or Val or Leu
  MISC_FEATURE (56)..(56): Absent or Leu or Val or Cys
  MISC_FEATURE (57)..(57): Absent or Arg or Ile or Ser
  MISC_FEATURE (58)..(58): Absent or Ser or Arg
  MISC_FEATURE (59)..(59): Absent or Ile or Pro or Ser
  MISC_FEATURE (60)..(60): Absent or Glu or Asp or Ala
  MISC_FEATURE (61)..(61): Absent or Lys or Glu or Asn
  MISC_FEATURE (62)..(62): Absent or Glu or Ser
  MISC_FEATURE (63)..(63): Absent or Pro or Arg
  MISC_FEATURE (64)..(64): Absent or Ala or Leu
  MISC_FEATURE (65)..(65): Absent or Glu or Lys
  MISC_FEATURE (66)..(66): Absent or Ser or Pro
  MISC_FEATURE (67)..(67): Absent or Ser or Leu or Ile
  MISC_FEATURE (68)..(68): Absent or Leu or Val or Ala
  MISC_FEATURE (69)..(69): Absent or Thr or Ser or Lys
  MISC_FEATURE (70)..(70): Absent or Leu or Ala
  MISC_FEATURE (71)..(71): Absent or His or Tyr or Asp
  MISC_FEATURE (72)..(72): Absent or Phe or Val or Leu
  MISC_FEATURE (73)..(73): Absent or Val or Ser or Cys
  MISC_FEATURE (74)..(74): Absent or Leu or Phe or Ile
  MISC_FEATURE (75)..(75): Absent or Val or Arg or Glu
  MISC_FEATURE (76)..(76): Absent or Ser or Leu
  MISC_FEATURE (77)..(77): Absent or Pro or Gly
  MISC_FEATURE (78)..(78): Absent or Lys or Arg
  MISC_FEATURE (79)..(79): Absent or Asn or Ser
  MISC_FEATURE (80)..(80): Absent or Tyr
  MISC_FEATURE (81)..(81): Absent or Pro
  MISC_FEATURE (82)..(82): Absent or Leu or Tyr
  MISC_FEATURE (83)..(83): Absent or Thr or Val
  MISC_FEATURE (84)..(84): Absent or Tyr or Thr or Lys
  MISC_FEATURE (85)..(85): Absent or Pro
  MISC_FEATURE (86)..(86): Absent or His or Thr or Val
  MISC_FEATURE (87)..(87): Absent or Ala or Ile
  MISC_FEATURE (88)..(88): Absent or Ala or Ile or Lys
  MISC_FEATURE (89)..(89): Absent or Pro or Val or Leu
  MISC_FEATURE (90)..(90): Absent or Gln or Lys
  MISC_FEATURE (91)..(91): Absent or Ile or Leu or Asn
  MISC_FEATURE (92)..(92): Absent or Thr or Asn or Gly
  MISC_FEATURE (93)..(93): Absent or Phe or Asp or Glu
  MISC_FEATURE (94)..(94): Absent or Lys or Gly or Asn
  MISC_FEATURE (95)..(95): Absent or Lys or Arg or Val
  MISC_FEATURE (96)..(96): Absent or Val or His or Leu
  MISC_FEATURE (97)..(97): Absent or Gln or Lys or Asn
  MISC_FEATURE (98)..(98): Absent or Asn or Gly
  MISC_FEATURE (99)..(99): Absent or Val or Leu
  MISC_FEATURE (100)..(100): Absent or Leu or Ser
  MISC_FEATURE (101)..(101): Absent or Asp or Ala
  MISC_FEATURE (102)..(102): Absent or Ser
  MISC_FEATURE (103)..(103): Absent or Gln or His
  MISC_FEATURE (104)..(104): Absent or Leu or Ile
  MISC_FEATURE (105)..(105): Absent or Ala or Thr or Arg
  MISC_FEATURE (106)..(106): Absent or Leu or Ser or Phe
  MISC_FEATURE (107)..(107): Absent or Leu
  MISC_FEATURE (108)..(108): Absent or Arg or Gly or Leu
  MISC_FEATURE (109)..(109): Absent or Asp or Gly
  MISC_FEATURE (110)..(110): Absent or Asp or Ala or Lys
  MISC_FEATURE (111)..(111): Absent or Ile or Leu
  MISC_FEATURE (112)..(112): Absent or Arg or Asn or Asp
  MISC_FEATURE (113)..(113): Absent or Arg or Thr
  MISC_FEATURE (114)..(114): Absent or Ile or Lys
  MISC_FEATURE (115)..(115): Absent or His or Ala
  MISC_FEATURE (116)..(116): Absent or Lys
  MISC_FEATURE (117)..(117): Absent or Ser or Asp
  MISC_FEATURE (118)..(118): Absent or Ala or Leu
  MISC_FEATURE (119)..(119): Absent or Arg or Ile or Leu
  MISC_FEATURE (120)..(120): Absent or Gly
  MISC_FEATURE (121)..(121): Absent or Gln or Ala or Glu
  MISC_FEATURE (122)..(122): Absent or Glu
  MISC_FEATURE (123)..(123): Absent or Ile or Met
  MISC_FEATURE (124)..(124): Absent or Leu or Ile
  MISC_FEATURE (125)..(125): Absent or Phe or Trp
  MISC_FEATURE (126)..(126): Absent or Glu
  MISC_FEATURE (127)..(127): Absent or Ile or Leu
  MISC_FEATURE (128)..(128): Absent or Thr or Ile or Ala
  MISC_FEATURE (129)..(129): Absent or Thr or Ser
  MISC_FEATURE (130)..(130): Absent or Arg or Val or Ile
  MISC_FEATURE (131)..(131): Absent or Val or Ala
  MISC_FEATURE (132)..(132): Absent or Gln
  MISC_FEATURE (133)..(133): Absent or Glu or Asp
  MISC_FEATURE (134)..(134): Absent or Val or Phe or Tyr
  MISC_FEATURE (135)..(135): Absent or Leu or Ile
  MISC_FEATURE (136)..(136): Absent or Asp or Ser or Asn
  MISC_FEATURE (137)..(137): Absent or Leu or Asp
  MISC_FEATURE (138)..(138): Absent or Asn
  MISC_FEATURE (139)..(139): Absent or Asn
  MISC_FEATURE (140)..(140): Absent or Thr
  MISC_FEATURE (141)..(141): Absent or Ile
  MISC_FEATURE (142)..(142): Absent or Pro
  MISC_FEATURE (143)..(143): Absent or Lys or Trp
  MISC_FEATURE (144)..(144): Absent or Glu or Gln
  MISC_FEATURE (145)..(145): Absent or Ser or Val
  MISC_FEATURE (146)..(146): Absent or Gln or Lys or Asp
  MISC_FEATURE (147)..(147): Absent or Ala or Asp or Leu
  MISC_FEATURE (148)..(148): Absent or Asn or Gly or Ser
  MISC_FEATURE (149)..(149): Absent or Ala or Ser
  MISC_FEATURE (150)..(150): Absent or Asn or Pro or Gln
  MISC_FEATURE (151)..(151): Absent or Thr or Ser or Phe
  MISC_FEATURE (152)..(152): Absent or Gln or Leu or Ala
  MISC_FEATURE (153)..(153): Absent or Ser
  MISC_FEATURE (154)..(154): Absent or Leu
  MISC_FEATURE (155)..(155): Absent or Glu
  MISC_FEATURE (156)..(156): Absent or Ala or Glu
  MISC_FEATURE (157)..(157): Absent or Glu
  MISC_FEATURE (158)..(158): Absent or Arg or Met
  MISC_FEATURE (159)..(159): Absent or Leu or Gln or Ala
  MISC_FEATURE (160)..(160): Absent or Gln or Lys or Val
  MISC_FEATURE (161)..(161): Absent or Arg or Gln
  MISC_FEATURE (162)..(162): Absent or Leu or Ala
  MISC_FEATURE (163)..(163): Absent or Glu or Lys
  MISC_FEATURE (164)..(164): Absent or Asp or Glu or His
  MISC_FEATURE (165)..(165): Absent or Glu or Gln or Asp
  MISC_FEATURE (166)..(166): Absent or Lys or Gln or Arg
  MISC_FEATURE (167)..(167): Absent or Val or Glu
  MISC_FEATURE (168)..(168): Absent or Lys or Arg
  MISC_FEATURE (169)..(169): Absent or Leu or Gln or Ala
  MISC_FEATURE (170)..(170): Absent or Lys or Arg or Glu
  MISC_FEATURE (171)..(171): Absent or Leu or Ala or Val
  MISC_FEATURE (172)..(172): Absent or Ala or Glu or Asp
  MISC_FEATURE (173)..(173): Absent or Glu or Gln or Leu
  MISC_FEATURE (174)..(174): Absent or Gln
  MISC_FEATURE (175)..(175): Absent or Glu or Leu
  MISC_FEATURE (176)..(176): Absent or Asn or Glu or Arg
  MISC_FEATURE (177)..(177): Absent or Lys or Asn or Leu
  MISC_FEATURE (178)..(178): Absent or Glu or Leu or Lys
  MISC_FEATURE (179)..(179): Absent or Lys or Arg
  MISC_FEATURE (180)..(180): Absent or Ile or Arg or Glu
  MISC_FEATURE (181)..(181): Absent or Glu or Gln or Lys
  MISC_FEATURE (182)..(182): Absent or Leu or Arg or Asp
  MISC_FEATURE (183)..(183): Absent or Glu or Ala
  MISC_FEATURE (184)..(184): Absent or Arg or Glu or Leu
  MISC_FEATURE (185)..(185): Absent or Ala or Thr or Phe
  MISC_FEATURE (186)..(186): Absent or Lys or Ile or Glu
  MISC_FEATURE (187)..(187): Absent or Glu or Arg
  MISC_FEATURE (188)..(188): Absent or Gln or Ser or Glu
  MISC_FEATURE (189)..(189): Absent or Glu or Gln
  MISC_FEATURE (190)..(190): Absent or Leu or Gln or Thr
  MISC_FEATURE (191)..(191): Absent or Ile or Leu
  MISC_FEATURE (192)..(192): Absent or Asp or Val or Gln
  MISC_FEATURE (193)..(193): Absent or Glu or Gln or Asn
  MISC_FEATURE (194)..(194): Absent or Leu or Lys
  MISC_FEATURE (195)..(195): Absent or Val or Ile
  MISC_FEATURE (196)..(196): Absent or Gln
  MISC_FEATURE (197)..(197): Absent or Lys or Gln or Asp
  MISC_FEATURE (198)..(198): Absent or Glu
  MISC_FEATURE (199)..(199): Absent or Leu or Ala
  MISC_FEATURE (200)..(200): Absent or Glu or Ser or Gln
  MISC_FEATURE (201)..(201): Absent or Lys or Arg
  MISC_FEATURE (202)..(202): Absent or Arg or Lys
  MISC_FEATURE (203)..(203): Absent or Gln or Ala or Ser
  MISC_FEATURE (204)..(204): Absent or Asp or Ala or Tyr
  MISC_FEATURE (205)..(205): Absent or Asp or Leu or Glu
  MISC_FEATURE (206)..(206): Absent or Asp or Leu or Thr
  MISC_FEATURE (207)..(207): Absent or Ser or Lys or Pro
  MISC_FEATURE (208)..(208): Absent or Leu or Gln
  MISC_FEATURE (209)..(209): Absent or Phe or Glu or Ser
  MISC_FEATURE (210)..(210): Absent or Gly or Lys or Ser
  MISC_FEATURE (211)..(211): Absent or Met or Glu or Ser
  MISC_FEATURE (212)..(212): Absent or Asp or Arg or Lys
  MISC_FEATURE (213)..(213): Absent or Lys
  MISC_FEATURE (214)..(214): Absent or Ala or Arg or Lys
  MISC_FEATURE (215)..(215): Absent or Val or Glu or Thr
  MISC_FEATURE (216)..(216): Absent or Asn
  MISC_FEATURE (217)..(217): Absent or Leu or Ser
  MISC_FEATURE (218)..(218): Absent or Leu or Tyr
  MISC_FEATURE (219)..(219): Absent or Pro or Phe
  MISC_FEATURE (220)..(220): Absent or Pro or Thr
  MISC_FEATURE (221)..(221): Absent or Ala or Gln
  MISC_FEATURE (222)..(222): Absent or Glu or His
  MISC_FEATURE (223)..(223): Absent or Trp or Gly
  MISC_FEATURE (224)..(224): Absent or Ile or Pro
  MISC_FEATURE (225)..(225): Absent or Ser or Leu
  MISC_FEATURE (226)..(226): Absent or Thr or Ser
  MISC_FEATURE (227)..(227): Absent or Gly or Pro
  MISC_FEATURE (228)..(228): Absent or Glu or Val
  MISC_FEATURE (229)..(229): Absent or Ala or His
  MISC_FEATURE (230)..(230): Absent or Tyr or Gly
  MISC_FEATURE (231)..(231): Absent or Val or Leu
  MISC_FEATURE (232)..(232): Absent or Phe or Asn
  MISC_FEATURE (233)..(233): Absent or Pro or Ala
  MISC_FEATURE (234)..(234): Absent or Lys or Ser
  MISC_FEATURE (235)..(235): Absent or Ala or Ser
  MISC_FEATURE (236)..(236): Absent or Ile or Thr
  MISC_FEATURE (237)..(237): Absent or Arg or Ser
  MISC_FEATURE (238)..(238): Absent or Ala or Lys
  MISC_FEATURE (239)..(239): Absent or Lys or Ser or Glu
  MISC_FEATURE (240)..(240): Absent or Leu or Ala or Thr
  MISC_FEATURE (241)..(241): Absent or Pro or Asp or Thr
  MISC_FEATURE (242)..(242): Absent or Asn or Thr or Ser
  MISC_FEATURE (243)..(243): Absent or Asn or Ala or Leu
  MISC_FEATURE (244)..(244): Absent or Ser or Ala or Glu
  MISC_FEATURE (245)..(245): Absent or Tyr or Asn or Thr
  MISC_FEATURE (246)..(246): Absent or Tyr or Thr or Leu
  MISC_FEATURE (247)..(247): Absent or Trp or Ala or Pro
  MISC_FEATURE (248)..(248): Absent or Phe or Ala or Thr
  MISC_FEATURE (249)..(249): Absent or Arg or Ala or Ser
  MISC_FEATURE (250)..(250): Absent or Ala or Ile
  MISC_FEATURE (251)..(251): Absent or Val or Ser or Tyr
  MISC_FEATURE (252)..(252): Absent or Val or Met or Phe
  MISC_FEATURE (253)..(253): Absent or Asn or Ser or Asp
  MISC_FEATURE (254)..(254): Absent or Lys or Asp or Cys
  MISC_FEATURE (255)..(255): Absent or Glu or Asp or Ser
  MISC_FEATURE (256)..(256): Absent or Pro or Ser or Ile
  MISC_FEATURE (257)..(257): Absent or Val or Arg or Ser
  MISC_FEATURE (258)..(258): Absent or Lys or Ile or Val
  MISC_FEATURE (259)..(259): Absent or Ile or Glu or Arg
  MISC_FEATURE (260)..(260): Absent or Gly or Thr or Asp
  MISC_FEATURE (261)..(261): Absent or Asn or Phe or Cys
  MISC_FEATURE (262)..(262): Absent or Asp or Leu or His
  MISC_FEATURE (263)..(263): Absent or Val or Glu or Asp
  MISC_FEATURE (264)..(264): Absent or Leu or Pro or Ser
  MISC_FEATURE (265)..(265): Absent or Ser or Ile or Leu
  MISC_FEATURE (266)..(266): Absent or Phe or Glu or Val
  MISC_FEATURE (267)..(267): Absent or Gly or His or Thr
  MISC_FEATURE (268)..(268): Absent or Lys or Asn or Phe
  MISC_FEATURE (269)..(269): Absent or Gln or Gly or Asn
  MISC_FEATURE (270)..(270): Absent or Tyr or Arg
  MISC_FEATURE (271)..(271): Absent or Thr or Val
  MISC_FEATURE (272)..(272): Absent or Val or Ile or Leu
  MISC_FEATURE (273)..(273): Absent or Lys or Ser or Pro
  MISC_FEATURE (274)..(274): Absent or Pro or Val or Leu
  MISC_FEATURE (275)..(275): Absent or Phe or Leu or Tyr
  MISC_FEATURE (276)..(276): Absent or Ile or Arg
  MISC_FEATURE (277)..(277): Absent or Pro or Val
  MISC_FEATURE (278)..(278): Absent or Ser or Gly
  MISC_FEATURE (279)..(279): Absent or Asp or Pro
  MISC_FEATURE (280)..(280): Absent or Ser or Val or Thr
  MISC_FEATURE (281)..(281): Absent or Pro or Leu or Ile
  MISC_FEATURE (282)..(282): Absent or Leu or Ser
  MISC_FEATURE (283)..(283): Absent or Ile or Asn or His
  MISC_FEATURE (284)..(284): Absent or Gly or Thr or Ser
  MISC_FEATURE (285)..(285): Absent or Ile or Gly or Asn
  MISC_FEATURE (286)..(286): Absent or Leu
  MISC_FEATURE (287)..(287): Absent or Ala or Ser
  MISC_FEATURE (288)..(288): Absent or Asn or Thr
  MISC_FEATURE (289)..(289): Absent or Arg or Leu
  MISC_FEATURE (290)..(290): Absent or His or Thr
  MISC_FEATURE (291)..(291): Absent or Leu
  MISC_FEATURE (292)..(292): Absent or Ala or Val
  MISC_FEATURE (293)..(293): Absent or Glu or Lys
  MISC_FEATURE (294)..(294): Absent or Pro
  MISC_FEATURE (295)..(295): Absent or Ala or Glu
  MISC_FEATURE (296)..(296): Absent or His or Ser
  MISC_FEATURE (297)..(297): Absent or Gln or Lys
  MISC_FEATURE (298)..(298): Absent or Ala or Glu
  MISC_FEATURE (299)..(299): Absent or Pro
  MISC_FEATURE (300)..(300): Absent or Thr
  MISC_FEATURE (301)..(301): Absent or Ala or Asp
  MISC_FEATURE (302)..(302): Absent or Asp or Ser or Ile
  MISC_FEATURE (303)..(303): Absent or Phe or Arg or Ser
  MISC_FEATURE (304)..(304): Absent or Met or Ala or Leu
  MISC_FEATURE (305)..(305): Absent or Asp or Pro or Gln
  MISC_FEATURE (306)..(306): Absent or Asn or Ser or Asp
  MISC_FEATURE (307)..(307): Absent or Phe or His or Cys
  MISC_FEATURE (308)..(308): Absent or His or Ser or Val
  MISC_FEATURE (309)..(309): Absent or Tyr or Trp or Phe
  MISC_FEATURE (310)..(310): Absent or Leu
  MISC_FEATURE (311)..(311): Absent or Leu or Ile
  MISC_FEATURE (312)..(312): Absent or Thr or Glu or Arg
  MISC_FEATURE (313)..(313): Absent or Glu or His or Thr
  MISC_FEATURE (314)..(314): Absent or Ile or Tyr or Val
  MISC_FEATURE (315)..(315): Absent or Glu or Leu or Arg
  MISC_FEATURE (316)..(316): Absent or Leu or Ile
  MISC_FEATURE (317)..(317): Absent or Gln or Thr or Ser
  MISC_FEATURE (318)..(318): Absent or Asn or Ser or Thr
  MISC_FEATURE (319)..(319): Absent or Ser or Gln or Pro
  MISC_FEATURE (320)..(320): Absent or Tyr or His or Met
  MISC_FEATURE (321)..(321): Absent or Phe or Tyr or Trp or Leu
  MISC_FEATURE (322)..(322): Absent or Asn or Ala or Ser or Arg
  MISC_FEATURE (323)..(323): Absent or Thr or Tyr
  MISC_FEATURE (324)..(324): Absent or Ser or Glu or Lys
  MISC_FEATURE (325)..(325): Absent or Asn or Ser or Asp or Thr
  MISC_FEATURE (326)..(326): Absent or Gly or Pro
  MISC_FEATURE (327)..(327): Met or Lys or Absent or Arg
  MISC_FEATURE (328)..(328): Arg or Lys or Absent or Pro
  MISC_FEATURE (329)..(329): Phe or Glu or Lys or Absent or Arg or Met
  MISC_FEATURE (330)..(330): Phe or Ile or Leu or Absent or Gly
  MISC_FEATURE (331)..(331): Asn or Ala or Glu or Gln or Absent or Gly or Arg
  MISC_FEATURE (332)..(332): Ala or Asn or Glu or Absent or Lys or Thr
  MISC_FEATURE (333)..(333): His or Leu or Val or Absent or Ala or Lys
  MISC_FEATURE (334)..(334): Lys or Glu or Absent or Arg or Thr
  MISC_FEATURE (335)..(335): Ser or Arg or Phe or Tyr or Absent or Pro or Met
  MISC_FEATURE (336)..(336): Ala or Glu or Absent or Arg or Asp
  MISC_FEATURE (337)..(337): Glu or Leu or Phe or Absent or Pro or Ile
  MISC_FEATURE (338)..(338): Asp or Glu or Absent or Gly or Arg or Ser
  MISC_FEATURE (339)..(339): Gly or Thr or Lys or Ser or Absent or Val
  MISC_FEATURE (340)..(340): Asn or Leu or Absent or Met or Ala or Gly or His
  MISC_FEATURE (341)..(341): Tyr or Leu or Val or Lys or Absent or Phe or Glu or Ser or Arg
  MISC_FEATURE (342)..(342): Ser or Lys or Val or Absent or Glu or Arg or Ala or Asp
  MISC_FEATURE (343)..(343): Glu or Val or Ile or Absent or Lys or Arg or Ala
  MISC_FEATURE (344)..(344): Thr or Asn or Arg or Absent or Lys or Gly
  MISC_FEATURE (345)..(345): Thr or His or Glu or Absent or Gly or Pro or Leu or Ala
  MISC_FEATURE (346)..(346): Asn or Glu or Pro or Asp or Absent or Arg or Ala or Thr
  MISC_FEATURE (347)..(347): Ala or His or Gly or Leu or Absent or Thr or Met or Arg or Lys
  MISC_FEATURE (348)..(348): Ile or Val or Leu or Absent or Thr or Ala or Met
  MISC_FEATURE (349)..(349): Ser or Asn or Ile or Ala or Absent or Leu or Lys or Arg or Asp or Met
  MISC_FEATURE (350)..(350): Leu or Lys or Asn or Ser or Absent or Ala or Met or Arg or Thr or Gly or Pro
  MISC_FEATURE (351)..(351): Lys or Leu or Val or Ile or Absent or Pro or Arg or Asn or Ser
  MISC_FEATURE (352)..(352): Asn or Tyr or Leu or Absent or Arg or Gly or Gln or Ser or Glu or Pro
  MISC_FEATURE (353)..(353): Glu or Ser or Ala or Absent or Lys or Arg or Pro
  MISC_FEATURE (354)..(354): Arg or Tyr or Ser or Absent or Thr or Asn or Glu
  MISC_FEATURE (355)..(355): Gln or Thr or Ala or Absent or Asn or Gly or Arg or Asp or Lys
  MISC_FEATURE (356)..(356): Ser or Val or Leu or Absent or Gly or Gln or Lys or Glu or Phe
  MISC_FEATURE (357)..(357): Arg or Glu or Thr or Absent or Gln or Lys or Ser or Leu or Pro
  MISC_FEATURE (358)..(358): Asp or Arg or Absent or Ile or Ser or Asn or Glu or Val or Leu
  MISC_FEATURE (359)..(359): Leu or Ile or Glu or Absent or Lys or Thr or Arg or Ser or Val
  MISC_FEATURE (360)..(360): Ser or Gly or Thr or Absent or Lys or Gln or Glu or Ala
  MISC_FEATURE (361)..(361): Val or Leu or Asp or Arg or Absent or Lys or Ser or Tyr
  MISC_FEATURE (362)..(362): Asn or Ser or Pro or Gly or Absent or Ala or Lys or Met or Glu
  MISC_FEATURE (363)..(363): Lys or Ser or Gln or Tyr or Absent or Asn or His or Gly or Arg or Asp
  MISC_FEATURE (364)..(364): His or Thr or Gly or Absent or Lys or Arg or Val or Cys
  MISC_FEATURE (365)..(365): Gly or Ser or Trp or Absent or Lys or Asp
  MISC_FEATURE (366)..(366): Arg or Phe or Lys or Absent or Ile or Met or Ser or Leu or Pro or Asp
  MISC_FEATURE (367)..(367): Met or Val or Leu or Absent or Arg or Lys or Thr or Ser or Ala
  MISC_FEATURE (368)..(368): Leu or Trp or Ser or Tyr or Absent or Gly or Phe or Asn or Pro
  MISC_FEATURE (369)..(369): Leu or Lys or Val or Absent or Ala or Arg or Thr or Glu or His
  MISC_FEATURE (370)..(370): Thr or Ile or Val or Leu or Absent or His or Pro
  MISC_FEATURE (371)..(371): Ala or Arg or Thr or Gln or Absent or Lys or Ser or Asn or Phe or Gly
  MISC_FEATURE (372)..(372): Leu or Glu or Absent or Met or Thr or Phe or Asp or Val
  MISC_FEATURE (373)..(373): Leu or Arg or Tyr or Absent or Glu or Lys or Thr or His or Val or Ser or Gln
  MISC_FEATURE (374)..(374): Glu or Thr or Ser or Absent or Gly or Lys or Arg or Leu
  MISC_FEATURE (375)..(375): Asn or Glu or Asp or Pro or Absent or Thr or Ile or Val
  MISC_FEATURE (376)..(376): Phe or Tyr or Gly or Lys or Absent or Leu or Thr or Ala or Ser or His or Asn or Pro
  MISC_FEATURE (377)..(377): Cys or Ala or Phe or Met or Absent or Glu or Thr or Lys or Leu or Val
  MISC_FEATURE (378)..(378): Gln or Glu or Cys or Thr or Ala or Absent or Arg or Pro or Gly or Ser or Lys
  MISC_FEATURE (379)..(379): Leu or Ser or Thr or Absent or His or Pro or Glu or Gln
  MISC_FEATURE (380)..(380): Tyr or Thr or Arg or Phe or Ala or Absent or Ser or Leu
  MISC_FEATURE (381)..(381): Asp or Cys or Ser or Ala or Absent or Leu or Thr or Gln or Pro or Arg or Phe
  MISC_FEATURE (382)..(382): Asn or Ile or Leu or Met or Absent or Val or Phe or Lys or Glu
  MISC_FEATURE (383)..(383): Asn or Gly or Leu or Lys or Absent or Gln or Glu or Thr
  MISC_FEATURE (384)..(384): Pro or Asn or Glu or Gln or Absent or Phe or Leu or Val or Ala or Ser
  MISC_FEATURE (385)..(385): Ala or Ile or Gln or Thr or Pro or Absent or Gly or Leu or Asp
  MISC_FEATURE (386)..(386): Lys or Ile or Cys or Val or Gly or Absent or Gln or Leu or Ala
  MISC_FEATURE (387)..(387): Ser or Glu or Asp or Leu or Gly or Absent or Val or His or Gln or Pro
  MISC_FEATURE (388)..(388): Lys or Ser or Thr or Absent or Glu or Arg or Cys or Val
  MISC_FEATURE (389)..(389): Arg or Val or Leu or Ile or Absent or Lys or Ser or Glu
  MISC_FEATURE (390)..(390): Leu or Gly or Pro or Asp or Phe or Absent or Ile or Cys or Glu
  MISC_FEATURE (391)..(391): Phe or Tyr or Trp or Val or Asn or Absent or Ser or Gln or Pro or Ala or Lys
  MISC_FEATURE (392)..(392): Ala or Val or Lys or Glu or Tyr or Absent or Phe or Asn or Leu or Thr or Gly or Pro
  MISC_FEATURE (393)..(393): Leu or Asn or Arg or Thr or Tyr or Absent or Glu or Gln or Val or Cys or Ala or Pro or Ile
  MISC_FEATURE (394)..(394): Ile or Leu or Val or Ser or Absent or Asn or Gln or Thr or Pro or Tyr or Ala
  MISC_FEATURE (395)..(395): Cys or Ala or Arg or Lys or Absent or Glu or Pro or Leu
  MISC_FEATURE (396)..(396): His or Thr or Ala or Gln or Absent or Pro or Ser or Leu
  MISC_FEATURE (397)..(397): Thr or Ser or Tyr or Phe or Lys or Absent or Glu or Asn or Asp or Pro
  MISC_FEATURE (398)..(398): Leu or Arg or Ser or Gln or Absent or Thr or Pro or Phe or Glu
  MISC_FEATURE (399)..(399): Gln or Gly or Leu or Asn or Absent or Thr or Ser
  MISC_FEATURE (400)..(400): Lys or Trp or Ala or Asn or Ser or Absent or Val or Arg or Pro
  MISC_FEATURE (401)..(401): Ile or Leu or Gln or Absent or Ala or Asp or Thr or Phe or Pro
  MISC_FEATURE (402)..(402): Gly or Leu or Gln or Absent or Ser or Asn or Thr or Pro or Glu or Asp
  MISC_FEATURE (403)..(403): Ile or Arg or Lys or Glu or Ser or Absent or Pro or Trp
  MISC_FEATURE (404)..(404): Leu or Thr or Gly or Gln or Absent or Ala or Ser or Arg
  MISC_FEATURE (405)..(405): Glu or Leu or Gln or Absent or Phe or Ala or Asp
  MISC_FEATURE (406)..(406): Glu or Asp or Ala or Gln or Absent or Val or Pro
  MISC_FEATURE (407)..(407): Glu or Ala or Ser or Gln or Absent or Gly or Arg
  MISC_FEATURE (408)..(408): Tyr or Leu or Cys or Absent or Asp or Glu or Pro or Ser or Thr
  MISC_FEATURE (409)..(409): Ile or Glu or His or Ser or Absent or Phe or Asp or Val or Gln or Cys or Arg
  MISC_FEATURE (410)..(410): Glu or Ser or Thr or Arg or Absent or Gln or Leu or Asp
  MISC_FEATURE (411)..(411): Glu or Leu or Arg or Ser or Absent or Asn or Pro or Met or Gly
  MISC_FEATURE (412)..(412): Leu or His or Asn or Gly or Thr or Absent or Pro or Asp
  MISC_FEATURE (413)..(413): Ala or Lys or Leu or Ile or Ser or Absent or Pro
  MISC_FEATURE (414)..(414): Ala or His or Val or Ser or Absent or Asp or Gln or Pro or Thr
  MISC_FEATURE (415)..(415): Val or Gly or His or Leu or Absent or Ala or Ser or Pro
  MISC_FEATURE (416)..(416): Arg or Ile or Lys or Gln or Absent or Leu or Glu or Asn or Pro
  MISC_FEATURE (417)..(417): Ser or Ala or Gly or Met or Absent or Asp or Phe or Pro
  MISC_FEATURE (418)..(418): Asn or His or Val or Leu or Ser or Absent or Pro
  MISC_FEATURE (419)..(419): Tyr or Lys or Asp or His or Leu or Absent or Asn or Ser or Thr or Pro
  MISC_FEATURE (420)..(420): Gln or Ala or Leu or Arg or Absent or Ser or Val or Ile or Thr or Pro or Glu
  MISC_FEATURE (421)..(421): Asp or Ile or His or Absent or Ser or Leu or Thr or Pro or Glu
  MISC_FEATURE (422)..(422): Ala or Asp or Ser or Asn or Met or Absent or Glu or Pro or Thr or Leu
  MISC_FEATURE (423)..(423): Leu or Ile or Val or Asn or Absent or Ser or Gln or Thr
  MISC_FEATURE (424)..(424): His or Phe or Val or Leu or Absent or Arg or Asn or Ser or Pro or Thr
  MISC_FEATURE (425)..(425): His or Thr or Ile or Leu or Gly or Absent or Asn or Val or Gln or Pro
  MISC_FEATURE (426)..(426): Leu or Val or Glu or Phe or Asp or Absent or Gln or Ala or Arg
  MISC_FEATURE (427)..(427): Ile or His or Ser or Absent or Leu or Ala or Thr or Gly
  MISC_FEATURE (428)..(428): Leu or Arg or Ser or Absent or Gly or Ile or Asp or Asn or Pro
  MISC_FEATURE (429)..(429): Gln or Ile or Thr or Gly or Arg or Absent or Ser or Asp or Val or Met or Ala
  MISC_FEATURE (430)..(430): Ala or Lys or Gln or His or Pro or Absent or Asn or Asp or Leu
  MISC_FEATURE (431)..(431): Arg or Asp or Ser or Pro or Absent or Ala or Gly
  MISC_FEATURE (432)..(432): Glu or Thr or Ala or Absent or Ser or Ile or Asp or Val
  MISC_FEATURE (433)..(433): Ala or Asp or Ile or Phe or Absent or Val or Glu
  MISC_FEATURE (434)..(434): Ile or Phe or Pro or Ala or Asn or Absent or Thr or Val
  MISC_FEATURE (435)..(435): Arg or Gly or Ser or Lys or Pro or Absent or Asn or Asp or Ala or Met or Val
  MISC_FEATURE (436)..(436): Leu or Asn or Val or Pro or Absent or Cys or Ala or Gly or Glu
  MISC_FEATURE (437)..(437): Asp or Thr or Leu or Met or Absent or Gly or Ala or Glu or Val
  MISC_FEATURE (438)..(438): Asp or Val or Arg or Gly or Absent or Glu or Asn or Lys
  MISC_FEATURE (439)..(439): Ala or Pro or Leu or Phe or Absent or Lys or Arg or Asp or Asn or His
  MISC_FEATURE (440)..(440): Glu or Lys or Ala or Gly or Val or Absent or Asp or Cys or Ser
  MISC_FEATURE (441)..(441): Glu or Leu or Gly or Absent or Phe or Cys or Ala
  MISC_FEATURE (442)..(442): Arg or Met or Ala or Absent or Ser or Ile
  MISC_FEATURE (443)..(443): Leu or His or Cys or Absent or Gln or Trp
  MISC_FEATURE (444)..(444): Leu or Ala or Tyr or Phe or Glu or Absent or Ser or Asp
  MISC_FEATURE (445)..(445): Ala or Ser or Thr or Pro or Absent or Gln or Val
  MISC_FEATURE (446)..(446): Leu or Tyr or Arg or Absent or Asp
  MISC_FEATURE (447)..(447): Pro or Gly or Arg or Thr or Absent or Phe or Ala
  MISC_FEATURE (448)..(448): Asp or His or Leu or Absent or Phe
  MISC_FEATURE (449)..(449): Pro or Thr or Lys or Arg or Met or Absent or Cys
  MISC_FEATURE (450)..(450): Thr or Ile or Asp or Arg or Absent or Ala
  MISC_FEATURE (451)..(451): Asn or Ser or Met or Ala or Absent or Pro or Asp
  MISC_FEATURE (452)..(452): Val or Asn or His or Leu or Absent or Asp or Ala
  MISC_FEATURE (453)..(453): Phe or Met or Lys or Ala or Arg or Absent or Tyr or Pro
  MISC_FEATURE (454)..(454): Glu or Leu or Ser or Pro or Absent or Ile or Ala
  MISC_FEATURE (455)..(455): Lys or Asn or His or Arg or Absent or Thr or Ser
  MISC_FEATURE (456)..(456): Phe or Arg or Pro or Val or Absent or Ala
  MISC_FEATURE (457)..(457): Pro or Tyr or Leu or Phe or Absent or Asp or Glu or Asn
  MISC_FEATURE (458)..(458): Gln or Pro or Asn or Asp or Absent or Gly or Ala or Met or Ser
  MISC_FEATURE (459)..(459): Glu or Asn or Asp or Ile or Leu or Absent or Gln or Pro or Val
  MISC_FEATURE (460)..(460): Thr or Leu or Asn or Ser or Absent or Ala or Gln or Glu
  MISC_FEATURE (461)..(461): Ala or Lys or Ile or Ser or Absent or Leu or Val
  MISC_FEATURE (462)..(462): Leu or Ser or Gly or Gln or Absent or Met or Phe or Cys or Ala or Arg
  MISC_FEATURE (463)..(463): Ser or Gly or Pro or Absent or Asn or Lys or Arg
  MISC_FEATURE (464)..(464): Lys or Ser or Ile or Absent or Gly or Glu or Arg
  MISC_FEATURE (465)..(465): Phe or Lys or Gln or Thr or Absent or Leu or Gly or Arg
  MISC_FEATURE (466)..(466): Ser or Met or Asp or Asn or Glu or Absent or Phe or Arg or Gly
  MISC_FEATURE (467)..(467): Val or Ile or Pro or Gln or Absent or Cys or Gly or Asp or Lys
  MISC_FEATURE (468)..(468): Asp or Val or Leu or Tyr or Absent or Ser or Asn or Ala or Gln or Thr
  MISC_FEATURE (469)..(469): Gly or Asn or Gln or Pro or Thr or Absent or Lys or Arg or Asp or Ile
  MISC_FEATURE (470)..(470): Leu or Asn or Pro or Glu or Absent or Asp or Lys or Ser
  MISC_FEATURE (471)..(471): Asn or Cys or Asp or Gly or Absent or His or Glu
  MISC_FEATURE (472)..(472): Val or Pro or Ala or Leu or His or Absent or Tyr or Cys or Asn or Glu or Asp
  MISC_FEATURE (473)..(473): Arg or Trp or Tyr or Leu or Absent or Ser or Ile or Thr or Met or Phe
  MISC_FEATURE (474)..(474): Gln or Ile or Lys or Pro or Thr or Absent or Ser or Asp
  MISC_FEATURE (475)..(475): Phe or Pro or Ser or Absent or Cys or Gln or Arg
  MISC_FEATURE (476)..(476): Arg or Pro or Glu or Gln or Absent
  MISC_FEATURE (477)..(477): Phe or Glu or Val or Absent or Arg or Lys or Asn or Asp
  MISC_FEATURE (478)..(478): Arg or Met or Ser or Gln or Absent or Tyr or Thr
  MISC_FEATURE (479)..(479): Asp or Val or Ile or Glu or Leu or Absent or Pro or Phe
  MISC_FEATURE (480)..(480): Leu or Lys or Asp or Ser or Phe or Absent or Val or Glu
  MISC_FEATURE (481)..(481): Thr or Phe or Gln or Ser or Arg or Absent or Lys
  MISC_FEATURE (482)..(482): Leu or Asn or Pro or Phe or Met or Absent or Ser or Glu
  MISC_FEATURE (483)..(483): Glu or Asn or Leu or Ala or Absent or Lys or Gln or Phe
  MISC_FEATURE (484)..(484): Ser or Ala or Tyr or Absent or Thr or Asn or Val or Asp
  MISC_FEATURE (485)..(485): Trp or Lys or Tyr or Ala or Glu or Absent or Val or Ser or Thr or Pro or Cys or Phe
  MISC_FEATURE (486)..(486): Leu or Pro or Ser or Absent or Lys or Arg or Ala or Asp
  MISC_FEATURE (487)..(487): Gln or Arg or Ser or Absent or Ile or Asp
  MISC_FEATURE (488)..(488): Ser or Arg or Lys or Thr or Absent or Gly
  MISC_FEATURE (489)..(489): Arg or Lys or Thr or Met or Absent
  MISC_FEATURE (490)..(490): Asn or Ser or Asp or Gln or Absent or Cys or Lys or Pro or Tyr or Met or Gly
  MISC_FEATURE (491)..(491): Ser or Asp or Ile or Val or Absent or Arg or Lys or Leu
  MISC_FEATURE (492)..(492): Arg or Ile or Trp or Asp or Absent or Gln or Glu or Pro or Leu or Thr or Gly
  MISC_FEATURE (493)..(493): Tyr or Trp or Asp or Cys or Absent or Glu or Gly or Ala
  MISC_FEATURE (494)..(494): Ile or Asn or Leu or Phe or Asp or Absent or Ser or Lys or Ala or Val or Cys or His
  MISC_FEATURE (495)..(495): Glu or Leu or Gly or Val or Absent or Phe or Ile or Met or Lys or Ser or Asp
  MISC_FEATURE (496)..(496): Asp or Ala or Val or Leu or Ser or Absent or Thr or Gly or Met or Pro
  MISC_FEATURE (497)..(497): Phe or Val or Cys or Leu or Arg or Absent or Gly or Tyr or Ala or His or Lys or Asp
  MISC_FEATURE (498)..(498): Glu or Leu or Ala or Val or Ser or Absent or Asn or Tyr or His or Arg or Thr or Gly
  MISC_FEATURE (499)..(499): Glu or Phe or Cys or Leu or Pro or Absent or His or Ser or Arg
  MISC_FEATURE (500)..(500): Tyr or Ile or Gln or Ala or Absent or Ser or Pro or Leu or Phe or Asp or Glu or Trp or Gly
  MISC_FEATURE (501)..(501): Ser or Gln or Met or Pro or Absent or Asn or Val or Asp or Ala
  MISC_FEATURE (502)..(502): Leu or Met or Ser or Absent or Pro or Asn or His or Thr or Phe
  MISC_FEATURE (503)..(503): Leu or Ile or Phe or Cys or Pro or Absent or Ser or Thr or Arg
  MISC_FEATURE (504)..(504): Gly or Ser or Arg or Absent or Thr or Leu or Phe or Asp or Gln or Val
  MISC_FEATURE (505)..(505): Arg or Gly or Leu or Ala or Absent or Trp or Phe or Cys or Val or Ile or Asn
  MISC_FEATURE (506)..(506): Gly or Val or Glu or His or Met or Absent or Ser or Asp or Pro or Arg or Thr or Phe
  MISC_FEATURE (507)..(507): Gly or Asp or Cys or Val or Lys or Absent or Ser or Phe or Trp or Ile or Arg
  MISC_FEATURE (508)..(508): Phe or Thr or Leu or Arg or Absent or Lys or His or Gln or Asp or Ile
  MISC_FEATURE (509)..(509): Gly or Pro or His or Asn or Absent or Gln or Ala or Asp or Ile
  MISC_FEATURE (510)..(510): Ser or Leu or Glu or Lys or Arg or Absent or Pro or Gln or Gly
  MISC_FEATURE (511)..(511): Val or His or Phe or Pro or Absent or Ile or Leu or Trp or Gln or Lys
  MISC_FEATURE (512)..(512): Tyr or Asp or Ser or Leu or Absent or Val or Ala or Thr or Ile or Trp or His or Pro
  MISC_FEATURE (513)..(513): His or Gln or Leu or Ser or Lys or Absent or Glu or Asp or Pro or Cys or Ile
  MISC_FEATURE (514)..(514): Val or Thr or Pro or Leu or Absent or Gln or Ile or any naturally occurring amino acid or Ala or Arg
  MISC_FEATURE (515)..(515): Arg or Pro or Glu or Lys or Leu or Absent or Gly or Val or Ala
  MISC_FEATURE (516)..(516): Asn or Val or His or Leu or Pro or Absent or Lys or Thr or Glu or Phe or Ser
  MISC_FEATURE (517)..(517): Lys or Asp or Leu or Ile or Gly or Absent or Ser or Gln or Ala
  MISC_FEATURE (518)..(518): Ile or Phe or Met or Asn or Absent or Asp or Thr or Ser or Ala or Leu or Glu
  MISC_FEATURE (519)..(519): Asp or Leu or Arg or Thr or Met or Absent or Ile or Phe or Gly or Glu or Gln
  MISC_FEATURE (520)..(520): Gly or Glu or His or Asp or Absent or Thr
  MISC_FEATURE (521)..(521): Ala or Ser or Val or Asp or Absent or Thr or Arg or Leu or Asn or Glu
  MISC_FEATURE (522)..(522): Glu or Val or Lys or Ile or Absent or Asp or Leu or Gly
  MISC_FEATURE (523)..(523): Tyr or Asp or Val or Pro or Absent or Glu or Leu
  MISC_FEATURE (524)..(524): Ala or Met or Leu or Ser or Absent or Val or Thr or Asp or Gly
  MISC_FEATURE (525)..(525): Met or Asp or Ala or Leu or Ser or Absent or Lys or Glu
  MISC_FEATURE (526)..(526): Lys or Glu or Pro or Gln or Absent or Gly or Val or Leu or Ser or Ala
  MISC_FEATURE (527)..(527): Lys or Ser or Absent or Gly or Asp or Glu or Arg
  MISC_FEATURE (528)..(528): Ile or Val or His or Ser or Gln or Absent or Lys or Thr
  MISC_FEATURE (529)..(529): Asn or Val or Tyr or Ser or Absent or Leu or Ala or Thr or Pro or Asp
  MISC_FEATURE (530)..(530): Ser or Asp or Gln or Absent or Lys or Gly
  MISC_FEATURE (531)..(531): Thr or Phe or Ala or Asp or Ser or Absent or Gln or Ile or Glu or Arg
  MISC_FEATURE (532)..(532): Phe or Leu or Arg or Absent or Ala or Val or Ile or Pro or Ser or Gly
  MISC_FEATURE (533)..(533): Gln or Asn or Leu or Val or Ser or Absent or Thr or Pro or Ala or Arg
  MISC_FEATURE (534)..(534): Gln or Lys or Leu or Arg or Val or Absent or Gly or Glu or Ser or Thr
  MISC_FEATURE (535)..(535): Met or Leu or Arg or Gly or Absent or Thr or Ser or Lys or Glu or His
  MISC_FEATURE (536)..(536): Ser or Leu or Met or Cys or Glu or Absent or Gln or Pro or any naturally occurring amino acid or Gly
  MISC_FEATURE (537)..(537): Tyr or Ala or Leu or Pro or Absent or Arg or Lys
  MISC_FEATURE (538)..(538): Ser or Pro or Glu or Met or Absent or Asn or Ala or Gly or Arg or Phe
  MISC_FEATURE (539)..(539): Lys or Asp or Arg or Thr or Absent or Gln or Pro or His or Gly or Glu
  MISC_FEATURE (540)..(540): Ile or Pro or Ala or Asp or Cys or Absent or Gly or Ser or Asn or Glu
  MISC_FEATURE (541)..(541): Phe or Arg or Ser or Absent or Tyr or Trp
  MISC_FEATURE (542)..(542): Arg or Leu or Lys or Absent or Val or Gln or Gly
  MISC_FEATURE (543)..(543): Glu or Arg or Lys or Ala or Absent or Ser or any naturally occurring amino acid or Thr or Asn
  MISC_FEATURE (544)..(544): Ile or Leu or Arg or Absent or Ser or Pro
  MISC_FEATURE (545)..(545): Lys or Gly or Pro or Ser or Absent or Gln or His
  MISC_FEATURE (546)..(546): Cys or Pro or Thr or Ser or Gly or Absent or Ala or Lys
  MISC_FEATURE (547)..(547): Leu or Ala or Arg or Absent or Lys
  MISC_FEATURE (548)..(548): Ala or Glu or Ile or Pro or Absent or Val or Phe
  MISC_FEATURE (549)..(549): Lys or Leu or Ser or Asp or Pro or Absent or Ala or Met or His or Glu
  MISC_FEATURE (550)..(550): Met or Leu or Ile or Absent or Val or Arg
  MISC_FEATURE (551)..(551): Asp or Pro or Val or Leu or Absent or Arg or His or Phe
  MISC_FEATURE (552)..(552): His or Met or Ser or Lys or Absent or any naturally occurring amino acid or Trp or Gly
  MISC_FEATURE (553)..(553): Pro or Lys or Arg or Absent
  MISC_FEATURE (554)..(554): Absent or Phe or Leu
  MISC_FEATURE (555)..(555): Absent or Leu or Asp
  MISC_FEATURE (556)..(556): Absent or Arg or Glu
  MISC_FEATURE (557)..(557): Absent or Thr or Leu
  MISC_FEATURE (558)..(558): Absent or Asn or Ile
  MISC_FEATURE (559)..(559): Absent or Ile or Leu
  MISC_FEATURE (560)..(560): Absent or Asp or Tyr
  MISC_FEATURE (561)..(561): Absent or Ala or Glu
  MISC_FEATURE (562)..(562): Absent or Ala or Asp
  MISC_FEATURE (563)..(563): Absent or Val or Thr
  MISC_FEATURE (564)..(564): Absent or Gly or Asp
  MISC_FEATURE (565)..(565): Absent or Leu
  MISC_FEATURE (566)..(566): Absent or Ala
  MISC_FEATURE (567)..(567): Absent or Asp
  MISC_FEATURE (568)..(568): Absent or Asp
  MISC_FEATURE (569)..(569): Absent or Ser
  MISC_FEATURE (570)..(570): Absent or Ser
  MISC_FEATURE (571)..(571): Absent or Thr
  MISC_FEATURE (572)..(572): Absent or Lys
  MISC_FEATURE (573)..(573): Absent or Met
  MISC_FEATURE (574)..(574): Absent or Pro
  MISC_FEATURE (575)..(575): Absent or Gln
  MISC_FEATURE (576)..(576): Absent or Gln
  MISC_FEATURE (577)..(577): Absent or His
  MISC_FEATURE (578)..(578): Absent or Val
  MISC_FEATURE (579)..(579): Absent or Lys or Thr
  MISC_FEATURE (580)..(580): Absent or Phe or Ser
  MISC_FEATURE (581)..(581): Absent or Tyr or Ala
  MISC_FEATURE (582)..(582): Absent or Leu or Ala
  MISC_FEATURE (583)..(583): Absent or Phe or Val
  MISC_FEATURE (584)..(584): Absent or Pro or Thr
  MISC_FEATURE (585)..(585): Absent or Asp or Pro
  MISC_FEATURE (586)..(586): Absent or Ser or Ala
  MISC_FEATURE (587)..(587): Absent or Val or Lys
  MISC_FEATURE (588)..(588): Absent or Gly or Pro
  MISC_FEATURE (589)..(589): Absent or Thr
  MISC_FEATURE (590)..(590): Asn or Gly or Lys or Ser or Leu or Absent or Cys or Tyr or Asp
  MISC_FEATURE (591)..(591): Val or Thr or Ala or His or Arg or Absent or Gly
  MISC_FEATURE (592)..(592): Ile or Pro or Thr or Val or Glu or Absent or Ala or His or Ser
  MISC_FEATURE (593)..(593): Arg or Thr or Pro or Ile or Val or Absent or Met or Glu or Ser
  MISC_FEATURE (594)..(594): Tyr or Ile or Arg or Gln or Absent or Pro or Asn or Ser
  MISC_FEATURE (595)..(595): Phe or Ile or Pro or Leu or Absent or Glu or Met
  MISC_FEATURE (596)..(596): Ser or Gly or Pro or Absent or Lys
  MISC_FEATURE (597)..(597): Ser or Thr or Met or Absent or Cys or Gln
  MISC_FEATURE (598)..(598): Trp or Gly or Ala or Pro or Met or Absent or Leu or Ile or Phe or Val or Lys
  MISC_FEATURE (599)..(599): Val or Ser or Arg or Thr or Absent or Lys or His
  MISC_FEATURE (600)..(600): Glu or Asn or Gln or Leu or Ile or Absent or His or Ser
  MISC_FEATURE (602)..(602): Thr or His or Ser or Pro or Tyr or Asn or Absent or Phe or Glu
  MISC_FEATURE (603)..(603): Thr or Leu or Asp or Val or Absent or Met or Ile
  MISC_FEATURE (604)..(604): Glu or Arg or Pro or Val or Absent or Leu or Lys or Gly or Asn or His
  MISC_FEATURE (605)..(605): Ala or Ser or Gln or Arg or Thr or Absent or Asn or Cys or Asp or His
  MISC_FEATURE (606)..(606): Thr or Arg or Asn or Gly or Ala or Ile or Absent or Gln or Leu or Val or Asp or His
  MISC_FEATURE (607)..(607): Gln or Gly or His or Thr or Asp or Ser or Absent or Pro or Leu
  MISC_FEATURE (608)..(608): Met or Ile or Phe or Asp or Asn or Absent or Glu or Cys or Pro or Gln or Arg
  MISC_FEATURE (609)..(609): Pro or Ser or Asp or Absent or Thr or Lys or Ile or Glu or Met
  MISC_FEATURE (610)..(610): Ile or Arg or Ala or Lys or Asn or Absent or Asp or Glu or Ser
  MISC_FEATURE (611)..(611): Val or Thr or Ser or His or Absent or Ile or Leu or Ala or Asp or Glu
  MISC_FEATURE (612)..(612): Met or Ser or Pro or Ala or Val or Absent or Asp or Asn or Tyr or Leu
  MISC_FEATURE (613)..(613): Ser or Asp or Arg or Phe or Absent or Pro or Val or Ala
  MISC_FEATURE (614)..(614): Lys or Gly or Pro or Gln or Absent or Phe or Tyr or Arg or Glu
  MISC_FEATURE (615)..(615): Asn or Gly or Lys or Ser or Ala or Absent or Glu or Thr
  MISC_FEATURE (616)..(616): Ser or His or Ile or Tyr or Absent or Asn or Gly or Lys
  MISC_FEATURE (617)..(617): Ser or Arg or Gly or Gln or Absent or Val
  MISC_FEATURE (618)..(618): Arg or Thr or Gly or Ser or Leu or Absent or Gln
  MISC_FEATURE (619)..(619): Val or Ser or Pro or Gln or Cys or Absent or Leu or Thr
  MISC_FEATURE (620)..(620): Leu or Phe or Gln or Absent or Lys or Asn or Ser
  MISC_FEATURE (621)..(621): Gly or Asn or Asp or Val or Absent or Cys or Tyr or Phe or Ser or Thr
  MISC_FEATURE (622)..(622): Thr or Val or Ala or Gly or Arg or Absent or Ser or Pro or Leu
  MISC_FEATURE (623)..(623): Ser or Gly or Absent or Lys or Val or Leu
  MISC_FEATURE (624)..(624): Absent or Gly
  MISC_FEATURE (625)..(625): Absent or Leu
  MISC_FEATURE (626)..(626): Absent or Gln
  MISC_FEATURE (627)..(627): Absent or Pro
  MISC_FEATURE (628)..(628): Absent or Ile
  MISC_FEATURE (629)..(629): Absent or Gly
  MISC_FEATURE (630)..(630): Absent or Ser
  MISC_FEATURE (631)..(631): Absent or Leu
  MISC_FEATURE (632)..(632): Absent or Trp
  MISC_FEATURE (633)..(633): Absent or Pro
  MISC_FEATURE (634)..(634): Absent or Phe
  MISC_FEATURE (635)..(635): Absent or Arg
  MISC_FEATURE (636)..(636): Absent or Ser
  MISC_FEATURE (637)..(637): Absent or Pro
  MISC_FEATURE (638)..(638): Ser or Absent or Ile or Phe or Leu or Val
  MISC_FEATURE (639)..(639): Tyr or Arg or Gly or Ile or Absent or Thr or Leu or Phe or Val or Asn or Ser
  MISC_FEATURE (640)..(640): Cys or Phe or Pro or Ile or Absent or Glu or Arg or Gln
  MISC_FEATURE (641)..(641): Asp or Ser or Gly or Absent or Val or Ala or Cys or Thr
  MISC_FEATURE (642)..(642): Val or Ser or Leu or Absent or Glu or Phe or Ile
  MISC_FEATURE (643)..(643): Asn or Val or Ser or Leu or Absent or Trp or Thr or Ile or Phe or Gly or Asp
  MISC_FEATURE (644)..(644): Gly or Asn or His or Tyr or Absent or Glu or Met or Ser or Leu
  MISC_FEATURE (645)..(645): Met or Ser or Ala or Arg or Absent or Gln or Ile or Gly or Leu or Asn
  MISC_FEATURE (646)..(646): Asp or Thr or Ala or Lys or Gly or Cys or Asn or Absent
  MISC_FEATURE (647)..(647): Ser or Thr or Ala or Asn or Phe or Gly or Cys or Absent
  MISC_FEATURE (652)..(652): Pro or Ala or Leu or Glu or Arg or His or Asn or Asp
  MISC_FEATURE (653)..(653): Thr or Ser or Trp or His or Asn or Ala or Lys or Asp
  MISC_FEATURE (660)..(660): Absent or Val
  MISC_FEATURE (661)..(661): Absent or Ser or Ile
  MISC_FEATURE (662)..(662): Absent or Asn or His
  MISC_FEATURE (663)..(663): Absent or Phe
  MISC_FEATURE (664)..(664): Absent or His
  MISC_FEATURE (665)..(665): Absent or Phe
  MISC_FEATURE (666)..(666): Absent or Met
  MISC_FEATURE (667)..(667): Absent or Leu
  MISC_FEATURE (668)..(668): Absent or Val
  MISC_FEATURE (669)..(669): Absent or Leu
  MISC_FEATURE (670)..(670): Absent or Leu
  MISC_FEATURE (671)..(671): Absent or Met
  MISC_FEATURE (672)..(672): Absent or Ser
  MISC_FEATURE (673)..(673): Absent or Thr
  MISC_FEATURE (674)..(674): Absent or Gln or Leu
  MISC_FEATURE (675)..(675): Absent or Thr or Asp
  MISC_FEATURE (676)..(676): Asp or Absent or Pro or Phe
  MISC_FEATURE (677)..(677): Asp or Absent or Ser or Gln
  MISC_FEATURE (678)..(678): Ile or Val or Phe or Glu or Gln or Lys
  MISC_FEATURE (681)..(681): Ala or Lys or Arg or His or Leu or Asp or Ile or Ser or Thr or Tyr
  MISC_FEATURE (683)..(683): Asp or Ala or Gly or Asn or His or Ser or Gln
  MISC_FEATURE (686)..(686): Thr or Gln or Ser or Glu or Lys or Arg or Asn or Val
  MISC_FEATURE (691)..(691): Ser or Arg or Lys or Val or Leu or Ile or Phe or Thr
  MISC_FEATURE (692)..(692): Thr or Asn or His or Lys or Asp or Ser
  MISC_FEATURE (698)..(698): Tyr or Phe or Ala or Met or Leu or Val or Glu
  MISC_FEATURE (703)..(703): Glu or Lys or Thr or Arg or His or Met
  MISC_FEATURE (705)..(705): Ser or Arg or Lys or Val or Thr or Ile or Phe or Leu
  MISC_FEATURE (706)..(706): Asn or Absent or Leu or Val or His or Arg or Lys
  MISC_FEATURE (707)..(707): Phe or Absent or Ser or Leu or Pro or Lys or Glu or Gln
  MISC_FEATURE (709)..(709): Asn or His or Ser or Asp or Thr or Arg or Tyr or Val or Phe
  MISC_FEATURE (710)..(710): Leu or Thr or Pro or Asp or Ser or Gln or Asn or Gly
  MISC_FEATURE (711)..(711): Glu or Asp or Lys or Leu or Thr or Gly or Arg
  MISC_FEATURE (712)..(712): Ser or Glu or Gln or Val or Thr or Asn or Met or Arg or Ala
  MISC_FEATURE (713)..(713): Pro or Lys or Asp or Asn or Ala or Glu or Arg or Gln
  MISC_FEATURE (716)..(716): Leu or Absent or Gly
  MISC_FEATURE (717)..(717): His or Absent or Leu
  MISC_FEATURE (718)..(718): Asp or Absent or Met or Gln or Lys or Asn or Arg
  MISC_FEATURE (720)..(720): Asn or Ile or Leu or Met or Val or Thr or Lys
  MISC_FEATURE (721)..(721): Val or Leu or Arg or Asn or Thr or Met or Lys or Gln
  MISC_FEATURE (726)..(726): Asn or Leu or Met or Val or Ala
  MISC_FEATURE (730)..(730): Leu or Absent or Gln or Gly or Trp or Glu or Pro
  MISC_FEATURE (731)..(731): Asp or Asn or His or Pro or Phe or Leu or Ser or Absent or Cys or Glu
  MISC_FEATURE (735)..(735): Ser or Val or Ile or Phe or Absent
  MISC_FEATURE (737)..(737): Ser or Arg or Gly or Lys or Absent or Asn
  MISC_FEATURE (739)..(739): His or Tyr or Ser or Absent or Phe
  MISC_FEATURE (740)..(740): Ile or Ala or Thr or Asp or Ser or Absent or Asn or Arg
  MISC_FEATURE (743)..(743): Thr or Leu or Ile or Val or Phe or Absent or Asn or Gln
  MISC_FEATURE (744)..(744): Gly or Glu or Absent
  MISC_FEATURE (745)..(745): Absent or Glu or Thr or Pro
  MISC_FEATURE (746)..(746): Absent or Asp or Thr or Glu
  MISC_FEATURE (747)..(747): Absent or Met or Gln or Ala
  MISC_FEATURE (748)..(748): Absent or Leu or Met or Asn
  MISC_FEATURE (749)..(749): Absent or Val or Pro or Asp or Gly
  MISC_FEATURE (750)..(750): Absent or Glu or Thr
  MISC_FEATURE (751)..(751): Absent or Glu or Ile or Val
  MISC_FEATURE (752)..(752): Absent or Met or Thr
  MISC_FEATURE (753)..(753): Absent or Ala or Gly or Glu
  MISC_FEATURE (754)..(754): Absent or Ile or Leu
  MISC_FEATURE (755)..(755): Absent or Thr or Ala or Ile
  MISC_FEATURE (756)..(756): Absent or Ser or Ala
  MISC_FEATURE (757)..(757): Absent or Ser
  MISC_FEATURE (758)..(758): Absent or Asp
  MISC_FEATURE (759)..(759): Absent or Glu or Thr or Ser
  MISC_FEATURE (760)..(760): Absent or Ser or Asp or Glu
  MISC_FEATURE (761)..(761): Absent or Asp or Gly or Ser
  MISC_FEATURE (762)..(762): Absent or Ile or Phe or Leu
  MISC_FEATURE (763)..(763): Absent or Glu or Thr or Ser
  MISC_FEATURE (764)..(764): Absent or Ser or Gln
  MISC_FEATURE (765)..(765): Absent or Asp or Ser
  MISC_FEATURE (766)..(766): Absent or Asp or Gln or Leu
  MISC_FEATURE (767)..(767): Absent or Asn or Thr
  MISC_FEATURE (768)..(768): Absent or Thr or Leu or Met
  MISC_FEATURE (769)..(769): Absent or Glu or Ala
  MISC_FEATURE (770)..(770): Absent or Ser or Thr or Val
  MISC_FEATURE (771)..(771): Absent or Ser or Asn or Asp
  MISC_FEATURE (772)..(772): Absent or Ile or Thr or Phe
  MISC_FEATURE (773)..(773): Absent or Ile or Thr or Arg
  MISC_FEATURE (774)..(774): Absent or Asp or Thr or Gln
  MISC_FEATURE (775)..(775): Absent or Ser
  MISC_FEATURE (776)..(776): Absent or Phe or Lys or Ser
  MISC_FEATURE (777)..(777): Absent or Ser or Thr
  MISC_FEATURE (778)..(778): Absent or Asn or His or Leu
  MISC_FEATURE (779)..(779): Absent or Ala or Pro
  MISC_FEATURE (780)..(780): Absent or Asn or Ser or Ala
  MISC_FEATURE (781)..(781): Absent or Val or Gly or Asp
  MISC_FEATURE (782)..(782): Absent or Thr or Pro
  MISC_FEATURE (783)..(783): Absent or Thr or Ser
  MISC_FEATURE (784)..(784): Absent or Thr or Leu
  MISC_FEATURE (785)..(785): Absent or Arg or Ser
  MISC_FEATURE (786)..(786): Absent or Thr or Met
  MISC_FEATURE (787)..(787): Absent or Val or Ser
  MISC_FEATURE (788)..(788): Absent or Leu or Ala
  MISC_FEATURE (789)..(789): Absent or Asn or Phe
  MISC_FEATURE (790)..(790): Absent or Gly
  MISC_FEATURE (791)..(791): Absent or Asn
  MISC_FEATURE (792)..(792): Absent or Gly
  MISC_FEATURE (793)..(793): Absent or Phe
  MISC_FEATURE (794)..(794): Absent or Gln
  MISC_FEATURE (795)..(795): Absent or Arg
  MISC_FEATURE (796)..(796): Absent or Ser
  MISC_FEATURE (797)..(797): Absent or Ala
  MISC_FEATURE (798)..(798): Absent or Leu
  MISC_FEATURE (799)..(799): Absent or Ser
  MISC_FEATURE (800)..(800): Absent or Asn
  MISC_FEATURE (801)..(801): Absent or Arg
  MISC_FEATURE (802)..(802): Absent or Gln
  MISC_FEATURE (803)..(803): Absent or Lys
  MISC_FEATURE (804)..(804): Absent or Ala
  MISC_FEATURE (805)..(805): Absent or Gly
  MISC_FEATURE (806)..(806): Absent or Arg
  MISC_FEATURE (807)..(807): Absent or Asp
  MISC_FEATURE (808)..(808): Absent or Asp
  MISC_FEATURE (809)..(809): Absent or Ser
  MISC_FEATURE (810)..(810): Absent or Phe
  MISC_FEATURE (811)..(811): Absent or Arg
  MISC_FEATURE (812)..(812): Absent or Ala
  MISC_FEATURE (813)..(813): Absent or Val
  MISC_FEATURE (814)..(814): Absent or Pro
  MISC_FEATURE (815)..(815): Absent or Gly
  MISC_FEATURE (816)..(816): Absent or Phe
  MISC_FEATURE (817)..(817): Absent or Asp
  MISC_FEATURE (818)..(818): Absent or Asp
  MISC_FEATURE (819)..(819): Absent or Asp
  MISC_FEATURE (820)..(820): Absent or Asp
  MISC_FEATURE (821)..(821): Absent or Asp
  MISC_FEATURE (822)..(822): Absent or Asp
  MISC_FEATURE (823)..(823): Absent or Ala
  MISC_FEATURE (824)..(824): Absent or Phe
  MISC_FEATURE (825)..(825): Absent or Ala
  MISC_FEATURE (826)..(826): Absent or Ser
  MISC_FEATURE (827)..(827): Absent or Gly
  MISC_FEATURE (828)..(828): Absent or Ala
  MISC_FEATURE (829)..(829): Absent or Asn
  MISC_FEATURE (830)..(830): Absent or Ser
  MISC_FEATURE (831)..(831): Absent or Ser
  MISC_FEATURE (832)..(832): Absent or Asn
  MISC_FEATURE (833)..(833): Absent or Leu
  MISC_FEATURE (834)..(834): Absent or Thr or Lys
  MISC_FEATURE (835)..(835): Absent or Gly or Leu
  MISC_FEATURE (836)..(836): Absent or Ser
  MISC_FEATURE (837)..(837): Absent or Met or Tyr or Ser
  MISC_FEATURE (838)..(838): Absent or Asn or Ser or Leu
  MISC_FEATURE (839)..(839): Absent or Asn or Asp
  MISC_FEATURE (840)..(840): Absent or Asp or Ile
  MISC_FEATURE (841)..(841): Absent or Trp or Arg or His
  MISC_FEATURE (842)..(842): Absent or Asp or Phe
  MISC_FEATURE (843)..(843): Absent or Phe or Ala or Glu
  MISC_FEATURE (844)..(844): Absent or Ile or Asp
  MISC_FEATURE (845)..(845): Absent or Ser or Asp
  MISC_FEATURE (846)..(846): Absent or His or Asp or Tyr
  MISC_FEATURE (847)..(847): Absent or Ser or Glu or Asn
  MISC_FEATURE (848)..(848): Absent or Phe or Asp or Ser
  MISC_FEATURE (849)..(849): Absent or Asn or Ser
  MISC_FEATURE (850)..(850): Absent or Asn or Ser or Ala
  MISC_FEATURE (851)..(851): Absent or Ser or Asp
  MISC_FEATURE (852)..(852): Absent or Ser or Gln or Glu
  MISC_FEATURE (853)..(853): Absent or Ile or Arg or Glu
  MISC_FEATURE (854)..(854): Absent or Ser or Asn or Asp
  MISC_FEATURE (855)..(855): Absent or Asn or Ala or Pro
  MISC_FEATURE (856)..(856): Absent or Ile or Gly or Glu
  MISC_FEATURE (857)..(857): Absent or Ile or Asn or Ala
  MISC_FEATURE (858)..(858): Absent or Phe or Ser
  MISC_FEATURE (859)..(859): Absent or Ala or Ser
  MISC_FEATURE (860)..(860): Absent or Asn or Arg
  MISC_FEATURE (861)..(861): Absent or Ser or Ala
  MISC_FEATURE (862)..(862): Absent or Thr or Ile
  MISC_FEATURE (863)..(863): Absent or Asp or Ala
  MISC_FEATURE (864)..(864): Absent or Glu or Asp
  MISC_FEATURE (865)..(865): Absent or Glu or Met
  MISC_FEATURE (866)..(866): Absent or Asp or Ser
  MISC_FEATURE (867)..(867): Absent or Ser or Tyr
  MISC_FEATURE (868)..(868): Absent or Ala or Lys
  MISC_FEATURE (869)..(869): Absent or Asn or Gly
  MISC_FEATURE (870)..(870): Absent or Asp or Gly
  MISC_FEATURE (871)..(871): Absent or Ile or Leu
  MISC_FEATURE (872)..(872): Absent or Pro or Leu
  MISC_FEATURE (873)..(873): Absent or Ser or Ala or Asp
  MISC_FEATURE (874)..(874): Absent or Glu or Leu or Ile
  MISC_FEATURE (875)..(875): Absent or Gly or Arg or Ser
  MISC_FEATURE (876)..(876): Absent or Ser or Thr or Phe
  MISC_FEATURE (877)..(877): Absent or Arg or Pro or Gln
  MISC_FEATURE (878)..(878): Absent or Ser or Tyr
  MISC_FEATURE (879)..(879): Absent or Glu or Asp or Ser
  MISC_FEATURE (880)..(880): Absent or Asp or Asn
  MISC_FEATURE (881)..(881): Absent or Glu or Ser or Thr
  MISC_FEATURE (882)..(882): Absent or Leu or Asp or Ser
  MISC_FEATURE (883)..(883): Absent or Thr or Asp
  MISC_FEATURE (884)..(884): Absent or Asp or Ser or Lys
  MISC_FEATURE (885)..(885): Absent or Lys or Glu
  MISC_FEATURE (886)..(886): Absent or His or Asp or Gly
  MISC_FEATURE (887)..(887): Absent or Tyr or Glu or Ser
  MISC_FEATURE (888)..(888): Absent or Glu or Asn or Ser
  MISC_FEATURE (889)..(889): Absent or Asp
  MISC_FEATURE (890)..(890): Absent or Glu or Lys
  MISC_FEATURE (891)..(891): Absent or Asn or Asp
  MISC_FEATURE (892)..(892): Absent or Asp or Ser
  MISC_FEATURE (893)..(893): Absent or Thr or Asp or Ser
  MISC_FEATURE (894)..(894): Absent or Lys or Arg or Ile
  MISC_FEATURE (895)..(895): Absent or Ser or Asp or Glu
  MISC_FEATURE (896)..(896): Absent or Ile or Ser or Glu
  MISC_FEATURE (897)..(897): Absent or Asp or Glu or Ala
  MISC_FEATURE (898)..(898): Absent or Gln or Val or Ser
  MISC_FEATURE (899)..(899): Absent or Gly or Ser
  MISC_FEATURE (900)..(900): Absent or Thr or Ser or Val
  MISC_FEATURE (901)..(901): Absent or Ser or Lys
  MISC_FEATURE (902)..(902): Absent or Pro or Glu or Thr
  MISC_FEATURE (903)..(903): Absent or Thr or Asp or Gln
  MISC_FEATURE (904)..(904): Absent or Leu or Glu
  MISC_FEATURE (905)..(905): Absent or Thr or Phe or Asn
  MISC_FEATURE (906)..(906): Absent or Glu or Gly
  MISC_FEATURE (907)..(907): Absent or Gly
  MISC_FEATURE (908)..(908): Absent or Arg or Asp
  MISC_FEATURE (909)..(909): Absent or Gly or Asp
  MISC_FEATURE (910)..(910): Absent or Gly or Asp
  MISC_FEATURE (911)..(911): Absent or Lys or Asp
  MISC_FEATURE (912)..(912): Absent or Gln or Asp
  MISC_FEATURE (913)..(913): Absent or Tyr or Asp
  MISC_FEATURE (914)..(914): Absent or Lys or Phe
  MISC_FEATURE (915)..(915): Absent or Ser
  MISC_FEATURE (916)..(916): Absent or Gly or Arg
  MISC_FEATURE (917)..(917): Absent or Ile
  MISC_FEATURE (918)..(918): Absent or Asn or Pro
  MISC_FEATURE (919)..(919): Absent or Tyr or Leu
  MISC_FEATURE (920)..(920): Absent or Arg or Ser
  MISC_FEATURE (921)..(921): Absent or Arg or Ser
  MISC_FEATURE (922)..(922): Absent or Ser or Arg
  MISC_FEATURE (923)..(923): Absent or Arg
  MISC_FEATURE (924)..(924): Absent or Arg or Ala
  MISC_FEATURE (925)..(925): Absent or Ser
  MISC_FEATURE (926)..(926): Absent or Leu or Arg
  MISC_FEATURE (927)..(927): Absent or Arg or Ala
  MISC_FEATURE (928)..(928): Absent or Pro or Gly
  MISC_FEATURE (929)..(929): Absent or Ala or Arg
  MISC_FEATURE (930)..(930): Absent or Asp or Ser
  MISC_FEATURE (931)..(931): Absent or Leu or Met
  MISC_FEATURE (932)..(932): Absent or Ala or Ser
  MISC_FEATURE (933)..(933): Absent or Asp or Arg
  MISC_FEATURE (934)..(934): Absent or Glu or Ser
  MISC_FEATURE (935)..(935): Absent or Lys or Val
  MISC_FEATURE (936)..(936): Absent or Arg or Val
  MISC_FEATURE (937)..(937): Absent or Ser or Asp
  MISC_FEATURE (938)..(938): Absent or Leu or Ala
  MISC_FEATURE (939)..(939): Absent or Met or Arg
  MISC_FEATURE (940)..(940): Absent or Lys or Leu
  MISC_FEATURE (941)..(941): Absent or Ser or Gly
  MISC_FEATURE (942)..(942): Absent or Ser or Asn
  MISC_FEATURE (943)..(943): Absent or Arg or Ser
  MISC_FEATURE (944)..(944): Pro or Ala or Val or Absent
  MISC_FEATURE (945)..(945): Thr or Lys or Pro or Absent or Gly or Phe or Leu
  MISC_FEATURE (947)..(947): Ser or Lys or Gln or Asn or Ala or Asp or Absent
  MISC_FEATURE (948)..(948): Phe or Ser or Arg or Ala or Glu or Thr or Absent or Lys or Asp or Gln
  MISC_FEATURE (949)..(949): Ile or Thr or Val or Gln or Tyr or Asn or Lys or Absent or Arg or His
  MISC_FEATURE (958)..(958): Phe or Glu or Gly or Ile or Asp or Absent or Pro or Ala
  MISC_FEATURE (959)..(959): Asp or Asn or Lys or Glu or Ser or Thr or His or Absent or Arg or Ala or Cys
  MISC_FEATURE (960)..(960): Asp or Arg or Leu or Ser or Asn or Ala or Absent or Cys or Trp or Gly
  MISC_FEATURE (962)..(962): Glu or Leu or Arg or Thr or Pro or Ser or Absent
  MISC_FEATURE (963)..(963): Ser or Tyr or Arg or Gln or Asp or Ala or Ile or Absent or Asn or Met or Thr
  MISC_FEATURE (964)..(964): Tyr or Asp or Glu or Met or Leu or Arg or Lys or Absent or Asn or Ser
  MISC_FEATURE (965)..(965): Leu or Ala or Ile or Phe or Arg or Absent or Pro or Val
  MISC_FEATURE (966)..(966): Ile or Absent or Asp or Lys or Leu or Phe
  MISC_FEATURE (967)..(967): Arg or His or Absent or Lys or Ala or Asp or Glu
  MISC_FEATURE (968)..(968): Arg or Asn or Absent or Glu or Ala
  MISC_FEATURE (969)..(969): Asn or Absent
  MISC_FEATURE (970)..(970): His or Absent
  MISC_FEATURE (971)..(971): Phe or Absent
  MISC_FEATURE (972)..(972): Leu or Absent
  MISC_FEATURE (973)..(973): Ser or Absent or Arg or Leu
  MISC_FEATURE (974)..(974): Phe or Absent or Lys or Pro
  MISC_FEATURE (975)..(975): Pro or Glu or Ile or Arg or Asp or Leu or Ser or Absent or Tyr or Gln
  MISC_FEATURE (976)..(976): Leu or Asn or Glu or Arg or Pro or Ser or Absent or Cys or Gln
  MISC_FEATURE (977)..(977): Cys or Leu or Lys or Asp or Val or Asn or Thr or His or Absent or Ala or Gln or Gly
  MISC_FEATURE (978)..(978): Lys or Ser or Gly or Gln or Val or Cys or Leu or Absent or Pro
  MISC_FEATURE (979)..(979): Glu or Gln or Leu or Ile or Phe or Ser or Val or Absent
  MISC_FEATURE (980)..(980): Gln or Thr or Pro or Lys or Ser or Absent or Asp or Ala
  MISC_FEATURE (981)..(981): Ile or Arg or Glu or Val or Lys or Absent or His or Cys
  MISC_FEATURE (982)..(982): Gln or Asp or Val or Thr or Gly or Arg or Absent or His or Leu
  MISC_FEATURE (983)..(983): Leu or Glu or Ser or Lys or Absent or Gln or Ala or Asp
  MISC_FEATURE (984)..(984): His or Tyr or Ala or Met or Val or Leu or Ser or Ile or Absent
  MISC_FEATURE (985)..(985): Thr or Trp or Leu or Absent or Arg
  MISC_FEATURE (986)..(986): Asp or Arg or Glu or Asn or Val or Absent or Lys
  MISC_FEATURE (987)..(987): Leu or Ile or Ala or Absent or Tyr
  MISC_FEATURE (988)..(988): Phe or Leu or Met or Cys or Absent or Ile or Ala
  MISC_FEATURE (989)..(989): Arg or Ile or His or Absent or Phe or Tyr or Gly or Glu
  MISC_FEATURE (991)..(991): Ile or Met or Leu or Absent or Val or Thr
  MISC_FEATURE (992)..(992): Ile or Leu or Val or Ala or Pro or Absent or Cys or Tyr
  MISC_FEATURE (993)..(993): Asn or Glu or Ser or Arg or Lys or Absent or His or Leu
  MISC_FEATURE (994)..(994): Gly or Ala or Pro or Absent
  MISC_FEATURE (996)..(996): Met or Ser or Ala or Lys or Asn or His or Gln or Absent or Asp
  MISC_FEATURE (997)..(997): Tyr or His or Arg or Ala or Leu or Phe or Absent
  MISC_FEATURE (998)..(998): Val or Ile or His or Thr or Absent or Met or Leu
  MISC_FEATURE (1000)..(1000): Glu or Ser or Asp or Arg or Absent or Gln or Lys or Leu
  MISC_FEATURE (1001)..(1001): Gly or Absent
  MISC_FEATURE (1002)..(1002): Val or Gln or Leu or Arg or Lys or Absent or His
  MISC_FEATURE (1004)..(1004): Leu or Ile or Met or Absent or Val or Phe
  MISC_FEATURE (1005)..(1005): Ile or Met or Val or Absent or Ala or Cys or Leu
  MISC_FEATURE (1009)..(1009): Ile or Leu or Val or Absent
  MISC_FEATURE (1012)..(1012): Ser or Met or Gly or Asp or Absent or Glu
  MISC_FEATURE (1015)..(1015): Phe or Leu or Tyr or Absent
  MISC_FEATURE (1016)..(1016): Leu or Ile or Met or Val or Absent or Thr
  MISC_FEATURE (1017)..(1017): Ala or Asp or Tyr or Leu or Absent or Lys or Arg or Ser
  MISC_FEATURE (1018)..(1018): Lys or Glu or Ala or Asn or Absent or Asp or Ser or Gly or Val
  MISC_FEATURE (1019)..(1019): Ser or Absent or Pro
  MISC_FEATURE (1020)..(1020): Leu or Absent or Ser
  MISC_FEATURE (1021)..(1021): Pro or Absent
  MISC_FEATURE (1022)..(1022): Glu or Absent or Ala
  MISC_FEATURE (1023)..(1023): Asp or Absent
  MISC_FEATURE (1024)..(1024): Absent or Leu
  MISC_FEATURE (1025)..(1025): Absent or Ala
  MISC_FEATURE (1026)..(1026): Absent or Leu
  MISC_FEATURE (1027)..(1027): Absent or Arg
  MISC_FEATURE (1028)..(1028): Absent or Ala
  MISC_FEATURE (1029)..(1029): Absent or Ala
  MISC_FEATURE (1030)..(1030): Absent or Ser
  MISC_FEATURE (1031)..(1031): Arg or Absent or Gly
  MISC_FEATURE (1032)..(1032): Gly or Absent or Ala
  MISC_FEATURE (1033)..(1033): Ser or Absent or Asn
  MISC_FEATURE (1034)..(1034): Val or Absent or Ala
  MISC_FEATURE (1035)..(1035): Pro or Absent or Ser
  MISC_FEATURE (1036)..(1036): Leu or Absent or Ser
  MISC_FEATURE (1037)..(1037): Ile or Absent or Ser
  MISC_FEATURE (1038)..(1038): Ser or Absent or Ala
  MISC_FEATURE (1039)..(1039): Tyr or Absent or Gly
  MISC_FEATURE (1040)..(1040): Asn or Absent or Ser
  MISC_FEATURE (1041)..(1041): Asp or Absent or Ser
  MISC_FEATURE (1042)..(1042): Lys or Absent or Ser
  MISC_FEATURE (1043)..(1043): Asn or Absent or Gly
  MISC_FEATURE (1044)..(1044): Asp or Absent or Gly
  MISC_FEATURE (1045)..(1045): Leu or Absent or Ser
  MISC_FEATURE (1046)..(1046): Lys or Absent or Ser
  MISC_FEATURE (1047)..(1047): Glu or Absent or Ala
  MISC_FEATURE (1048)..(1048): Tyr or Ser or Asn or Ala or Absent or Thr or Gln
  MISC_FEATURE (1049)..(1049): Ile or Arg or Gly or Pro or Absent or Asn or Met
  MISC_FEATURE (1050)..(1050): Thr or Asn or Asp or Val or Absent or Ile or Pro or Arg
  MISC_FEATURE (1051)..(1051): Pro or Ile or Val or Tyr or Absent or Cys or Leu
  MISC_FEATURE (1053)..(1053): Ile or Leu or Absent or Met
  MISC_FEATURE (1055)..(1055): Absent or Arg
  MISC_FEATURE (1059)..(1059): Leu or Arg or Absent or Cys or Val or Gln
  MISC_FEATURE (1061)..(1061): Val or Lys or Thr or Met or Absent or Pro
  MISC_FEATURE (1062)..(1062): Glu or Asn or Leu or Arg or Absent or Val or Tyr
  MISC_FEATURE (1063)..(1063): Asn or Val or Ala or Pro or Absent or Leu or Ile
  MISC_FEATURE (1064)..(1064): Lys or His or Leu or Glu or Gly or Asp or Absent or Asn or Val or Cys or Met
  MISC_FEATURE (1065)..(1065): Lys or Gln or Asn or Gly or Absent or Arg or Ser or Glu
  MISC_FEATURE (1066)..(1066): Asn or Ser or Ile or Tyr or Gln or Absent or Arg
  MISC_FEATURE (1067)..(1067): Thr or Ala or Gln or Arg or Met or Absent or Leu or Gly
  MISC_FEATURE (1068)..(1068): Glu or Asp or Ala or Absent or Pro or Gly or Trp
  MISC_FEATURE (1069)..(1069): Thr or Ile or Gly or Absent or Asp
  MISC_FEATURE (1070)..(1070): Ala or Leu or Asn or Absent
  MISC_FEATURE (1071)..(1071): Leu or Arg or Ala or Absent
  MISC_FEATURE (1072)..(1072): Ser or Ile or Gly or Asn or Absent
  MISC_FEATURE (1073)..(1073): Phe or Glu or Asn or Absent
  MISC_FEATURE (1074)..(1074): Leu or Gly or Ala or Asp or Absent
  MISC_FEATURE (1075)..(1075): Glu or Ala or Gly or Lys or Absent
  MISC_FEATURE (1076)..(1076): Arg or Phe or Gly or Trp or Absent
  MISC_FEATURE (1077)..(1077): Asn or Gly or Thr or Lys or Absent
  MISC_FEATURE (1078)..(1078): Absent or Thr or Asn
  MISC_FEATURE (1079)..(1079): His or Ser or Asp or Arg or Absent
  MISC_FEATURE (1080)..(1080): Leu or Asn or Gln or Absent
  MISC_FEATURE (1081)..(1081): Pro or Val or Ala or Ser or Absent
  MISC_FEATURE (1082)..(1082): Asn or Ser or Glu or Ala or Absent
  MISC_FEATURE (1083)..(1083): Leu or Ala or Ser or Asp or Absent
  MISC_FEATURE (1084)..(1084): Gln or Asp or Thr or Glu or Absent
  MISC_FEATURE (1085)..(1085): Asp or Absent
  MISC_FEATURE (1086)..(1086): Glu or Leu or Absent
  MISC_FEATURE (1087)..(1087): Thr or Absent
  MISC_FEATURE (1088)..(1088): Gln or Ser or Gly or Thr or Ile or Absent or Val or Trp
  MISC_FEATURE (1089)..(1089): His or Ala or Asp or Gly or Ser or Glu or Absent
  MISC_FEATURE (1090)..(1090): Ile or Leu or Val or Glu or Absent or Asp
  MISC_FEATURE (1092)..(1092): Thr or Asp or Absent
  MISC_FEATURE (1093)..(1093): Ala or Tyr or Val or Absent or Ser or Gly
  MISC_FEATURE (1094)..(1094): Thr or Leu or Lys or Arg or Absent or Gly
  MISC_FEATURE (1096)..(1096): Ala or Val or Thr or Leu or Met or Absent
  MISC_FEATURE (1097)..(1097): Ala or Pro or Absent
  MISC_FEATURE (1098)..(1098): Pro or Ser or Leu or Absent or Gln
  MISC_FEATURE (1100)..(1100): Leu or Val or Ala or Ile or Absent or Met
  MISC_FEATURE (1102)..(1102): Asp or Thr or Ala or Ser or Lys or Asn or Absent or Gln
  MISC_FEATURE (1103)..(1103): Ala or Gly or Lys or Arg or Ser or Absent or Cys or Leu
  MISC_FEATURE (1104)..(1104): Met or Absent or Ser or Arg or Asp
  MISC_FEATURE (1105)..(1105): Ser or Absent or Asn or Asp
  MISC_FEATURE (1106)..(1106): Ser or Absent or Phe or Cys
  MISC_FEATURE (1107)..(1107): Gln or Absent or Leu or Asp or Glu or Pro
  MISC_FEATURE (1108)..(1108): His or Asn or Gly or Thr or Asp or Absent or Lys or Glu
  MISC_FEATURE (1109)..(1109): Asn or Gly or Val or Ser or His or Absent or Tyr or Glu or Gln
  MISC_FEATURE (1110)..(1110): Lys or Asn or Arg or Gly or Ser or Absent or Glu or Asp or Val or Tyr
  MISC_FEATURE (1111)..(1111): Phe or Tyr or Leu or Gln or Absent or His or Asp or Pro
  MISC_FEATURE (1112)..(1112): Thr or Asn or Asp or Ala or Leu or Absent or Ser
  MISC_FEATURE (1113)..(1113): Lys or Glu or Phe or Ala or Asp or Thr or Absent or Pro
  MISC_FEATURE (1114)..(1114): Lys or Arg or Absent or Met or Ser
  MISC_FEATURE (1115)..(1115): Ile or Val or Leu or Absent or Cys or Ala
  MISC_FEATURE (1117)..(1117): Thr or Met or Ile or Val or Absent
  MISC_FEATURE (1118)..(1118): Phe or Tyr or Absent
  MISC_FEATURE (1122)..(1122): Met or Ile or Ala or Absent or Val
  MISC_FEATURE (1123)..(1123): Val or Ile or Ser or Thr or Absent or Ala or Met
  MISC_FEATURE (1124)..(1124): Leu or Phe or Val or Ile or Absent or Ala
  MISC_FEATURE (1125)..(1125): Phe or Tyr or Absent
  MISC_FEATURE (1127)..(1127): Leu or Met or Absent or Trp or Val
  MISC_FEATURE (1128)..(1128): Leu or Val or Cys or Ala or Absent or Ile
  MISC_FEATURE (1129)..(1129): His or Tyr or Ala or Met or Arg or Absent or Lys or Thr or Ser
  MISC_FEATURE (1130)..(1130): Pro or His or Ser or Thr or Gly or Absent or Arg or Asp
  MISC_FEATURE (1131)..(1131): Phe or Gln or Absent or Thr or Leu or Ser or His
  MISC_FEATURE (1132)..(1132): Gln or Asp or Arg or Absent or Glu or Pro or His or Ser or Asn or Lys
  MISC_FEATURE (1133)..(1133): Thr or Val or Absent or Leu or Ser or Phe
  MISC_FEATURE (1134)..(1134): Asn or Leu or Tyr or Phe or Pro or Absent or Thr
  MISC_FEATURE (1135)..(1135): Met or Arg or Ser or Lys or Thr or Absent or Glu or Asp or Ala
  MISC_FEATURE (1136)..(1136): Glu or Thr or Asn or Ser or Absent or Gly
  MISC_FEATURE (1137)..(1137): Arg or Gly or Ser or Absent
  MISC_FEATURE (1138)..(1138): Absent or Ala or Met or Asp
  MISC_FEATURE (1139)..(1139): Absent or Thr or Glu
  MISC_FEATURE (1140)..(1140): Ala or Asp or Arg or Absent or Trp
  MISC_FEATURE (1141)..(1141): Thr or Leu or Ile or Gln or Ala or Absent or Asn or Tyr or Cys or Pro or Ser or His
  MISC_FEATURE (1142)..(1142): Lys or Arg or Leu or Ser or Gln or Absent or His
  MISC_FEATURE (1143)..(1143): Leu or Lys or Ile or Tyr or Phe or Absent or Ser
  MISC_FEATURE (1144)..(1144): Gln or Leu or Ile or His or Absent or Phe or Thr or Ala or Arg
  MISC_FEATURE (1145)..(1145): Asp or Arg or Ser or Absent or Asn or Pro or Thr
  MISC_FEATURE (1146)..(1146): Leu or Ser or Glu or Thr or Ile or Absent or Gly or Ala or Pro
  MISC_FEATURE (1147)..(1147): Arg or Ser or Leu or Ile or Absent or Lys or Trp
  MISC_FEATURE (1148)..(1148): Arg or Ala or Gln or Glu or Absent or Leu or Met
  MISC_FEATURE (1149)..(1149): Gly or Val or Asp or Ser or Absent or Ala
  MISC_FEATURE (1150)..(1150): Asn or Glu or Ser or Pro or Lys or Absent or Leu or Ile
  MISC_FEATURE (1151)..(1151): Absent or Leu or Gly or Ser
  MISC_FEATURE (1152)..(1152): Absent or Pro or Ile
  MISC_FEATURE (1153)..(1153): Absent or Ser
  MISC_FEATURE (1154)..(1154): Absent or Leu or Phe
  MISC_FEATURE (1155)..(1155): Leu or Absent or Pro
  MISC_FEATURE (1156)..(1156): Pro or Absent or Ala or Ser or Leu or Phe or Ile or Thr
  MISC_FEATURE (1157)..(1157): Glu or Ala or Val or Thr or Phe or Ser or Absent or Pro or Arg
  MISC_FEATURE (1158)..(1158): Glu or Asn or Trp or Phe or Leu or Absent or Ala or Met
  MISC_FEATURE (1159)..(1159): Phe or Pro or Leu or Absent or Ile
  MISC_FEATURE (1160)..(1160): Val or Asp or His or Phe or Ser or Pro or Absent or Glu
  MISC_FEATURE (1161)..(1161): Glu or Ser or Absent or Gly or Trp
  MISC_FEATURE (1162)..(1162): Gln or Ser or Lys or Arg or Ala or Tyr or Absent or His or Cys or Val
  MISC_FEATURE (1163)..(1163): His or Lys or Leu or Ala or Ser or Absent or Pro
  MISC_FEATURE (1164)..(1164): Ile or Arg or Glu or Ser or Thr or Leu or Absent or Met or Gln or Ala
  MISC_FEATURE (1165)..(1165): Cys or Asn or Lys or His or Arg or Thr or Absent or Gln or Ala or Glu
  MISC_FEATURE (1166)..(1166): Glu or Gln or Ile or Leu or Absent or Phe
  MISC_FEATURE (1167)..(1167): Ser or Lys or Thr or Phe or Ile or Gln or Absent or Cys or Ala
  MISC_FEATURE (1168)..(1168): Ser or Lys or Thr or Asn or Absent or Gln or Met or Arg
  MISC_FEATURE (1169)..(1169): Leu or Ile or Val or Absent
  MISC_FEATURE (1170)..(1170): Ile or Leu or Phe or Absent or Val
  MISC_FEATURE (1171)..(1171): Leu or Arg or His or Lys or Absent or Ala
  MISC_FEATURE (1172)..(1172): Trp or Leu or Gln or Cys or Lys or Ala or Absent or Thr or Val or Ser or Gly
  MISC_FEATURE (1173)..(1173): Met or Leu or Absent or Cys
  MISC_FEATURE (1174)..(1174): Thr or Leu or Met or Absent
  MISC_FEATURE (1175)..(1175): Ala or Asp or Gln or Ser or Asn or Absent
  MISC_FEATURE (1176)..(1176): Lys or His or Pro or Absent or Arg or Phe
  MISC_FEATURE (1179)..(1179): Thr or Ala or Asp or Ser or Absent or Lys or Val or Phe or Leu
  MISC_FEATURE (1180)..(1180): Lys or Arg or Gln or Ala or Absent or Glu
  MISC_FEATURE (1183)..(1183): Ser or Thr or Absent
  MISC_FEATURE (1184)..(1184): Leu or Ala or Pro or Ser or Absent
  MISC_FEATURE (1185)..(1185): Leu or Ala or Gln or Asp or Absent or Arg or Lys or Glu
  MISC_FEATURE (1186)..(1186): Glu or Lys or Gly or Absent or Asp or Gln
  MISC_FEATURE (1187)..(1187): Val or Leu or Ile or Absent
  MISC_FEATURE (1188)..(1188): Leu or Absent or Val or Ile or Ala
  MISC_FEATURE (1189)..(1189): Asn or Ala or Lys or Glu or Arg or Absent or Asp or Ser
  MISC_FEATURE (1190)..(1190): Cys or Ser or His or Absent or Asn or Tyr or Phe
  MISC_FEATURE (1191)..(1191): Gly or Asp or Glu or Thr or Ser or Absent or Pro or Arg or Ala
  MISC_FEATURE (1192)..(1192): Leu or Trp or Ala or Val or Absent or Met or Ile or Ser or Lys or Arg
  MISC_FEATURE (1193)..(1193): Leu or Ile or Phe or Absent or Pro or Asn or Glu
  MISC_FEATURE (1194)..(1194): Leu or Pro or Gln or His or Absent or Asp or Cys or Glu or Ser or Asn
  MISC_FEATURE (1195)..(1195): Pro or Val or Ala or Arg or Absent or Lys or Glu
  MISC_FEATURE (1196)..(1196): Asn or Lys or Gly or Absent or Ile or Leu or Trp or Cys or Met or Ala
  MISC_FEATURE (1197)..(1197): Gln or His or Met or Val or Thr or Leu or Absent or Arg or Glu or Ala
  MISC_FEATURE (1198)..(1198): Val or Gln or Glu or Gly or Ser or Ala or Absent or Arg or Lys or Ile or Leu
  MISC_FEATURE (1199)..(1199): Ser or Asp or Glu or Arg or Absent or Phe or Asn or Thr or Ala
  MISC_FEATURE (1200)..(1200): Met or Glu or Ser or Val or Absent or Lys or Ala or Pro or Leu
  MISC_FEATURE (1201)..(1201): Pro or Val or Tyr or Phe or Gln or Ser or Absent or Thr or Lys or Asn or Ala or Gly
  MISC_FEATURE (1202)..(1202): Asn or Thr or Ile or Leu or Ser or Absent or Pro or Lys or Trp or Ala
  MISC_FEATURE (1203)..(1203): Ile or Lys or Glu or Gln or Ala or Leu or Absent or Thr
  MISC_FEATURE (1204)..(1204): Ser or Glu or Ala or Asp or Absent or Lys
  MISC_FEATURE (1205)..(1205): Asn or Ala or Cys or Gly or Thr or Absent or Arg or Ile or Met
  MISC_FEATURE (1206)..(1206): Ile or Leu or Thr or Absent or Phe or Gln
  MISC_FEATURE (1207)..(1207): Val or Lys or Arg or Ser or Glu or Absent or Asn
  MISC_FEATURE (1208)..(1208): Ser or Asn or Leu or Thr or Val or Absent or Glu or Arg
  MISC_FEATURE (1209)..(1209): Thr or Leu or Met or Pro or Absent or Ile
  MISC_FEATURE (1210)..(1210): Asn or Ala or Ser or Leu or Glu or Absent or Phe
  MISC_FEATURE (1211)..(1211): His or Asp or Asn or Pro or Lys or Absent or Gln
  MISC_FEATURE (1212)..(1212): Leu or Pro or Met or Ser or Absent or Ile or Glu
  MISC_FEATURE (1213)..(1213): Asp or Ser or Thr or Asn or Leu or Absent or Pro or Arg
  MISC_FEATURE (1214)..(1214): Val or Ser or Thr or Gln or Absent or Lys
  MISC_FEATURE (1215)..(1215): Glu or Pro or Ala or Absent or Lys or Thr
  MISC_FEATURE (1216)..(1216): Thr or Trp or Tyr or Absent or Ser or Asp
  MISC_FEATURE (1217)..(1217): Gln or Asn or Tyr or Absent or Asp or Leu
  MISC_FEATURE (1218)..(1218): Met or Gln or His or Leu or Absent or Ser or Glu
  MISC_FEATURE (1219)..(1219): Lys or Gln or Absent or Ser or Asn
  MISC_FEATURE (1220)..(1220): Leu or Val or Absent or Asn or Gln
  MISC_FEATURE (1221)..(1221): Ile or Arg or Met or Leu or Absent or Thr
  MISC_FEATURE (1222)..(1222): Met or Glu or Asp or Lys or Absent or Leu or Asn
  MISC_FEATURE (1223)..(1223): Asp or Ser or Ala or Val or Absent or Gly or Lys
  MISC_FEATURE (1224)..(1224): Glu or Leu or Absent or Thr or Arg
  MISC_FEATURE (1225)..(1225): Asn or Phe or Absent or Lys
  MISC_FEATURE (1226)..(1226): Gln or Ser or Gly or Absent or Cys or Lys
  MISC_FEATURE (1227)..(1227): Arg or Gln or Absent or Leu
  MISC_FEATURE (1228)..(1228): Leu or Pro or Thr or Gln or Absent or Ser or Arg
  MISC_FEATURE (1229)..(1229): Arg or Tyr or Ala or Val or Absent or Leu or Asn
  MISC_FEATURE (1230)..(1230): Glu or Ser or Ala or Pro or Absent or Ile
  MISC_FEATURE (1231)..(1231): Gln or Leu or Asp or Absent or Ser or Val
  MISC_FEATURE (1232)..(1232): Ile or Ser or Leu or Arg or Absent or Ala
  MISC_FEATURE (1233)..(1233): Ala or Asn or Val or His or Absent
  MISC_FEATURE (1234)..(1234): Val or Asp or Arg or Lys or Absent or Phe
  MISC_FEATURE (1235)..(1235): Leu or Ile or Asp or Absent or Val
  MISC_FEATURE (1236)..(1236): Arg or Leu or Phe or Absent or Thr
  MISC_FEATURE (1237)..(1237): Ser or Phe or Thr or Absent or Val
  MISC_FEATURE (1238)..(1238): Arg or Asp or Phe or Tyr or Absent or Ser
  MISC_FEATURE (1239)..(1239): Ile or Asn or Asp or Absent or Gln
  MISC_FEATURE (1240)..(1240): Gln or Ser or Thr or Phe or Absent or Tyr
  MISC_FEATURE (1241)..(1241): His or Gln or Gly or Asn or Absent or Leu
  MISC_FEATURE (1242)..(1242): Leu or Asn or Ala or Absent
  MISC_FEATURE (1243)..(1243): Glu or Thr or Ser or Absent
  MISC_FEATURE (1244)..(1244): Thr or Ala or Glu or Absent or Gly
  MISC_FEATURE (1245)..(1245): Arg or Thr or Asp or Glu or Absent or Tyr
  MISC_FEATURE (1246)..(1246): Absent or Pro or Arg or Ser or Val
  MISC_FEATURE (1247)..(1247): Absent or Gly or Pro
  MISC_FEATURE (1248)..(1248): Absent or Val or Phe
  MISC_FEATURE (1249)..(1249): Absent or Leu
  MISC_FEATURE (1250)..(1250): Absent or Ser or Tyr
  MISC_FEATURE (1251)..(1251): Absent or Lys or Glu
  MISC_FEATURE (1252)..(1252): Absent or Val or Arg
  MISC_FEATURE (1253)..(1253): Absent or Ser or Phe
  MISC_FEATURE (1254)..(1254): Absent or Asp or His or Arg
  MISC_FEATURE (1255)..(1255): Absent or Arg or Thr or Asn
  MISC_FEATURE (1256)..(1256): Absent or Gly or Met or Leu
  MISC_FEATURE (1257)..(1257): Absent or Phe or Trp or Val
  MISC_FEATURE (1258)..(1258): Absent or Ser or Asp or Glu or His
  MISC_FEATURE (1259)..(1259): Absent or Gln or Thr or Ser or Trp or Leu
  MISC_FEATURE (1260)..(1260): Absent or Leu or Ser or Ile
  MISC_FEATURE (1261)..(1261): Absent or Leu or Lys or Met
  MISC_FEATURE (1262)..(1262): Absent or Arg or Thr or Ala
  MISC_FEATURE (1263)..(1263): Absent or Ala or Thr or Cys or Lys
  MISC_FEATURE (1264)..(1264): Absent or Gln or Val or Leu or Lys
  MISC_FEATURE (1265)..(1265): Absent or Met or Val or Asn or Asp
  MISC_FEATURE (1266)..(1266): Absent or Lys or Cys or Arg or Gly or Ser
  MISC_FEATURE (1267)..(1267): Absent or Glu or Asp or Val
  MISC_FEATURE (1268)..(1268): Absent or Glu or Leu or His
  MISC_FEATURE (1269)..(1269): Absent or Val or Ile or Glu
  MISC_FEATURE (1270)..(1270): Absent or Glu or Arg or Val or Ala
  MISC_FEATURE (1271)..(1271): Absent or Lys or Asn or Gly
  MISC_FEATURE (1272)..(1272): Absent or Val or Ala or Trp
  MISC_FEATURE (1273)..(1273): Absent or Phe or Ala or Ser
  MISC_FEATURE (1274)..(1274): Absent or Arg or Val
  MISC_FEATURE (1275)..(1275): Absent or Arg or Met
  MISC_FEATURE (1276)..(1276): Absent or His or Glu
  MISC_FEATURE (1277)..(1277): Absent or Gly or Ala
  MISC_FEATURE (1278)..(1278): Absent or Gly or Ala
  MISC_FEATURE (1279)..(1279): Absent or Ile or Val or Lys
  MISC_FEATURE (1280)..(1280): Absent or Glu or Ala
  MISC_FEATURE (1281)..(1281): Absent or Asn or Phe or Arg or Lys
  MISC_FEATURE (1282)..(1282): Absent or Asn or Thr or Glu or Leu
  MISC_FEATURE (1283)..(1283): Absent or Glu or Ala or Ser or Gln
  MISC_FEATURE (1284)..(1284): Absent or Pro or His or Lys
  MISC_FEATURE (1285)..(1285): Absent or Pro or Leu or Ile
  MISC_FEATURE (1286)..(1286): Absent or Ile or Leu
  MISC_FEATURE (1287)..(1287): Absent or Ile or Val or Phe or Glu
  MISC_FEATURE (1288)..(1288): Absent or Phe or Pro or Glu
  MISC_FEATURE (1289)..(1289): Absent or Pro or Lys or Val
  MISC_FEATURE (1290)..(1290): Absent or Lys or Asn or Ser or Pro
  MISC_FEATURE (1291)..(1291): Absent or Ala or Gly or Ser or Asp
  MISC_FEATURE (1292)..(1292): Absent or Pro or Leu or Gln or Glu
  MISC_FEATURE (1293)..(1293): Absent or Phe or Tyr or Pro
  MISC_FEATURE (1294)..(1294): Absent or Tyr or Thr or Asp or Pro
  MISC_FEATURE (1295)..(1295): Absent or Ser or Ala or Lys or Phe
  MISC_FEATURE (1296)..(1296): Absent or Ser or Asn or Asp
  MISC_FEATURE (1297)..(1297): Absent or Gln or Glu or Pro
  MISC_FEATURE (1298)..(1298): Absent or Asn or Lys or Ala or Val
  MISC_FEATURE (1299)..(1299): Absent or Val or Ile or Ser or Gln
  MISC_FEATURE (1300)..(1300): Absent or Tyr or Val or Arg
  MISC_FEATURE (1301)..(1301): Absent or Glu or Gln or Ser or Met
  MISC_FEATURE (1302)..(1302): Absent or Val or Met or Leu or Glu or Gln
  MISC_FEATURE (1303)..(1303): Absent or Leu or Ile
  MISC_FEATURE (1304)..(1304): Absent or Asp or Phe or Tyr
  MISC_FEATURE (1305)..(1305): Absent or Arg or Lys or Thr
  MISC_FEATURE (1306)..(1306): Absent or Gly or Thr or Asn or Val
  MISC_FEATURE (1307)..(1307): Absent or Gly or Val
  MISC_FEATURE (1308)..(1308): Absent or Ser or Arg or Thr or His
  MISC_FEATURE (1309)..(1309): Absent or Val or Leu or Asn
  MISC_FEATURE (1310)..(1310): Absent or Leu or Val
  MISC_FEATURE (1311)..(1311): Absent or Gln or His or Cys
  MISC_FEATURE (1312)..(1312): Absent or Leu or Thr
  MISC_FEATURE (1313)..(1313): Absent or Gln or Pro
  MISC_FEATURE (1314)..(1314): Absent or Tyr or Lys
  MISC_FEATURE (1315)..(1315): Absent or Asp or Pro
  MISC_FEATURE (1316)..(1316): Absent or Leu or Thr or Pro
  MISC_FEATURE (1317)..(1317): Absent or Thr or Val or Asn
  MISC_FEATURE (1318)..(1318): Absent or Tyr or Val or Leu or Asp
  MISC_FEATURE (1319)..(1319): Absent or Pro or Tyr
  MISC_FEATURE (1320)..(1320): Absent or Met or Phe or Tyr or Ser
  MISC_FEATURE (1321)..(1321): Absent or Ala or Gln
  MISC_FEATURE (1322)..(1322): Absent or Arg or Gln
  MISC_FEATURE (1323)..(1323): Absent or Tyr or Val or Asn or Ile
  MISC_FEATURE (1324)..(1324): Absent or Leu or Phe or Val or Tyr
  MISC_FEATURE (1325)..(1325): Absent or Ser or Ala or Asp
  MISC_FEATURE (1326)..(1326): Absent or Lys or Arg
  MISC_FEATURE (1327)..(1327): Absent or Asn or Ser or Tyr
  MISC_FEATURE (1328)..(1328): Absent or Pro or Ser or Ala or Gly
  MISC_FEATURE (1329)..(1329): Absent or His or Asn or Val or Gly
  MISC_FEATURE (1330)..(1330): Absent or Cys or Gln or Glu or Val
  MISC_FEATURE (1331)..(1331): Absent or Ile or Arg or Glu or Tyr
  MISC_FEATURE (1332)..(1332): Absent or Ser or Phe or Glu or Val
  MISC_FEATURE (1333)..(1333): Absent or Lys or Asp
  MISC_FEATURE (1334)..(1334): Absent or Gln or Arg or Thr or Tyr
  MISC_FEATURE (1335)..(1335): Absent or Tyr or Asn
  MISC_FEATURE (1336)..(1336): Absent or Arg or Glu or Leu or Lys
  MISC_FEATURE (1337)..(1337): Absent or Met or Ile or Gln
  MISC_FEATURE (1338)..(1338): Absent or Gln or Ser or Thr
  MISC_FEATURE (1339)..(1339): Absent or Ser or Asn or Asp or Val
  MISC_FEATURE (1340)..(1340): Absent or Val or Leu
  MISC_FEATURE (1341)..(1341): Absent or Tyr or Phe or Pro
  MISC_FEATURE (1342)..(1342): Absent or Arg or Ala
  MISC_FEATURE (1343)..(1343): Absent or Pro or Glu or Ile
  MISC_FEATURE (1344)..(1344): Absent or Ala or Asn or Arg
  MISC_FEATURE (1345)..(1345): Absent or Glu or Val or Ala
  MISC_FEATURE (1346)..(1346): Absent or Gln or Val or Lys
  MISC_FEATURE (1347)..(1347): Absent or Gln or Ala or Gly or His
  MISC_FEATURE (1348)..(1348): Absent or His or Gly
  MISC_FEATURE (1349)..(1349): Absent or Gly or Glu
  MISC_FEATURE (1350)..(1350): Absent or Ser or Gln or Arg or Tyr
  MISC_FEATURE (1351)..(1351): Absent or Val or Pro or Met
  MISC_FEATURE (1352)..(1352): Absent or Glu or Arg or Lys or Leu
  MISC_FEATURE (1353)..(1353): Absent or Pro or Ala or Arg
  MISC_FEATURE (1354)..(1354): Absent or Arg or Val or Ile or Glu
  MISC_FEATURE (1355)..(1355): Absent or Arg or Leu or Lys
  MISC_FEATURE (1356)..(1356): Absent or Phe or Ala or Glu or Val
  MISC_FEATURE (1357)..(1357): Absent or Gly
  MISC_FEATURE (1358)..(1358): Absent or Glu
  MISC_FEATURE (1359)..(1359): Absent or Ile
  MISC_FEATURE (1360)..(1360): Absent or Asp or Ala or Ile or Lys
  MISC_FEATURE (1361)..(1361): Absent or Phe or Ser or Arg
  MISC_FEATURE (1362)..(1362): Absent or Asp or Phe or Trp
  MISC_FEATURE (1363)..(1363): Absent or Ile or Asp or Ala
  MISC_FEATURE (1364)..(1364): Absent or Ile or Asn
  MISC_FEATURE (1365)..(1365): Absent or Ser or Val or Thr or Gln
  MISC_FEATURE (1366)..(1366): Absent or Gly or Ser or Thr or Lys
  MISC_FEATURE (1367)..(1367): Absent or Ser or Asn or Ile
  MISC_FEATURE (1368)..(1368): Absent or Ser or Pro or Leu
  MISC_FEATURE (1369)..(1369): Absent or Ala or Glu or Asp or Val
  MISC_FEATURE (1370)..(1370): Absent or Asp or Lys or Asn or Arg
  MISC_FEATURE (1371)..(1371): Absent or Ser or Leu or Trp
  MISC_FEATURE (1372)..(1372): Absent or Ala or Asp or Leu
  MISC_FEATURE (1373)..(1373): Absent or Leu or Ala or Trp or Ser
  MISC_FEATURE (1374)..(1374): Absent or Tyr or Ala or His
  MISC_FEATURE (1375)..(1375): Absent or Asp or Glu or Phe
  MISC_FEATURE (1376)..(1376): Absent or Ala or Phe
  MISC_FEATURE (1377)..(1377): Absent or Glu
  MISC_FEATURE (1378)..(1378): Absent or Ser or Ala or Thr or Tyr
  MISC_FEATURE (1379)..(1379): Absent or Ile or Leu
  MISC_FEATURE (1380)..(1380): Absent or Lys or Ala or Asp
  MISC_FEATURE (1381)..(1381): Absent or Ile or Leu or Ala or Arg
  MISC_FEATURE (1382)..(1382): Absent or Ile or Val or Leu or Phe
  MISC_FEATURE (1383)..(1383): Absent or Asp or Glu or Tyr
  MISC_FEATURE (1384)..(1384): Absent or Glu or Thr
  MISC_FEATURE (1385)..(1385): Absent or Leu or Val or Arg
  MISC_FEATURE (1386)..(1386): Absent or Ile or Leu or Arg
  MISC_FEATURE (1387)..(1387): Absent or Ser or Asp or Thr or Gly
  MISC_FEATURE (1388)..(1388): Absent or Val or Glu or Ser
  MISC_FEATURE (1389)..(1389): Absent or Phe or Ile or His
  MISC_FEATURE (1390)..(1390): Absent or Pro
  MISC_FEATURE (1391)..(1391): Absent or Val or Gly or Ser or Thr
  MISC_FEATURE (1392)..(1392): Absent or Phe or Ile or Leu
  MISC_FEATURE (1393)..(1393): Absent or Glu or Ala or Thr or Ser
  MISC_FEATURE (1394)..(1394): Absent or Lys or Asn or Ala
  MISC_FEATURE (1395)..(1395): Absent or Thr or Glu or Val
  MISC_FEATURE (1396)..(1396): Absent or Asn or Asp or Glu or Gly
  MISC_FEATURE (1397)..(1397): Absent or Thr or Trp or Ser or Phe
  MISC_FEATURE (1398)..(1398): Absent or Leu or Val or Cys or Ile
  MISC_FEATURE (1399)..(1399): Absent or Ile or Ser
  MISC_FEATURE (1400)..(1400): Absent or Ile or His or Leu or Phe
  MISC_FEATURE (1401)..(1401): Absent or Val or Ile or Arg
  MISC_FEATURE (1402)..(1402): Absent or Asn or Asp
  MISC_FEATURE (1403)..(1403): Absent or His or Leu
  MISC_FEATURE (1404)..(1404): Absent or Ser or Glu or Ala or Val
  MISC_FEATURE (1405)..(1405): Absent or Asp or Val or Tyr
  MISC_FEATURE (1406)..(1406): Absent or Ile or Val or Gln
  MISC_FEATURE (1407)..(1407): Absent or Met or Leu or Glu
  MISC_FEATURE (1408)..(1408): Absent or Glu or Ser or Leu
  MISC_FEATURE (1409)..(1409): Absent or Ser or Met or Gln
  MISC_FEATURE (1410)..(1410): Absent or Ile or Ser
  MISC_FEATURE (1411)..(1411): Absent or Phe or Leu or Lys
  MISC_FEATURE (1412)..(1412): Absent or Asn or Glu or Asp or Ala
  MISC_FEATURE (1413)..(1413): Absent or Leu or Arg or Tyr or Lys
  MISC_FEATURE (1414)..(1414): Absent or Cys or Ile or Leu or Asp
  MISC_FEATURE (1415)..(1415): Absent or Ser or Pro or Gln or Ala
  MISC_FEATURE (1416)..(1416): Absent or Ile or Ala or Val
  MISC_FEATURE (1417)..(1417): Absent or Asp or Lys or Ser or Leu
  MISC_FEATURE (1418)..(1418): Absent or Lys or His or Ala
  MISC_FEATURE (1419)..(1419): Absent or Ala or His or Asp or Leu
  MISC_FEATURE (1420)..(1420): Absent or Gln or Thr or Lys or Ile
  MISC_FEATURE (1421)..(1421): Absent or Arg or Ala or His
  MISC_FEATURE (1422)..(1422): Absent or Ser or Val or Arg or Lys
  MISC_FEATURE (1423)..(1423): Absent or Leu or Met or Glu
  MISC_FEATURE (1424)..(1424): Absent or Val or Gly or Ala or Arg
  MISC_FEATURE (1425)..(1425): Absent or Ser or Thr or Glu
  MISC_FEATURE (1426)..(1426): Absent or Gln or His or Gly
  MISC_FEATURE (1427)..(1427): Absent or Met or Val or Ile or Glu
  MISC_FEATURE (1428)..(1428): Absent or Leu or Val or Gln
  MISC_FEATURE (1429)..(1429): Absent or Ser or Ala or Gly or Ile
  MISC_FEATURE (1430)..(1430): Absent or Gln or Leu or Asp
  MISC_FEATURE (1431)..(1431): Absent or Val or Leu or Ile or Arg
  MISC_FEATURE (1432)..(1432): Absent or Gly or Ala or Asn
  MISC_FEATURE (1433)..(1433): Absent or Phe or Gly or Gln or Leu
  MISC_FEATURE (1434)..(1434): Absent or Ala or Ser or Arg or Leu
  MISC_FEATURE (1435)..(1435): Absent or Lys or Leu
  MISC_FEATURE (1436)..(1436): Absent or Ser or Thr or Asn
  MISC_FEATURE (1437)..(1437): Absent or Phe or Ile or Leu or Val
  MISC_FEATURE (1438)..(1438): Absent or Lys or Gln or Ser or Ile
  MISC_FEATURE (1439)..(1439): Absent or Asp or Ser or Gln
  MISC_FEATURE (1440)..(1440): Absent or Val or Ala
  MISC_FEATURE (1441)..(1441): Absent or Lys or Arg or Tyr
  MISC_FEATURE (1442)..(1442): Absent or Thr or Asn or Cys
  MISC_FEATURE (1443)..(1443): Absent or Glu or His or Gln or Gly
  MISC_FEATURE (1444)..(1444): Absent or Leu or Asn
  MISC_FEATURE (1445)..(1445): Absent or Lys or Arg or Gly
  MISC_FEATURE (1446)..(1446): Absent or Ala or Leu or Ile or Met
  MISC_FEATURE (1447)..(1447): Absent or Gln or Glu or Gly
  MISC_FEATURE (1448)..(1448): Absent or Leu or Ser or Glu
  MISC_FEATURE (1449)..(1449): Absent or Asn or Gly or Leu
  MISC_FEATURE (1450)..(1450): Absent or Ile or Leu or Val
  MISC_FEATURE (1451)..(1451): Absent or Ser or Pro or Lys
  MISC_FEATURE (1452)..(1452): Absent or Ser or Arg or Tyr
  MISC_FEATURE (1453)..(1453): Absent or Thr or Ser or Glu
  MISC_FEATURE (1454)..(1454): Absent or Ser or Thr or Glu
  MISC_FEATURE (1455)..(1455): Absent or Leu or Ile or Asp
  MISC_FEATURE (1456)..(1456): Absent or Asn or Glu or Asp or Phe
  MISC_FEATURE (1457)..(1457): Absent or Asp or Glu
  MISC_FEATURE (1458)..(1458): Absent or Leu or Ser
  MISC_FEATURE (1459)..(1459): Absent or Glu or Ser or Phe
  MISC_FEATURE (1460)..(1460): Absent or Met or Ala or Leu
  MISC_FEATURE (1461)..(1461): Absent or Phe or Leu
  MISC_FEATURE (1462)..(1462): Absent or Asp or Asn or Glu
  MISC_FEATURE (1463)..(1463): Absent or Phe or Leu or Asp
  MISC_FEATURE (1464)..(1464): Absent or Lys or Asn or Arg or Ser
  MISC_FEATURE (1465)..(1465): Absent or Val or Asp or Glu or Ala
  MISC_FEATURE (1466)..(1466): Absent or Asp or Glu or Asn or Ser
  MISC_FEATURE (1467)..(1467): Absent or Phe or Val or Tyr
  MISC_FEATURE (1468)..(1468): Absent or Asp or Ser or Glu or Tyr
  MISC_FEATURE (1469)..(1469): Absent or Asn or Ala or Glu or Ser
  MISC_FEATURE (1470)..(1470): Absent or Ala or Val or Gly or Arg
  MISC_FEATURE (1471)..(1471): Absent or Lys or His or Ala or Asn
  MISC_FEATURE (1472)..(1472): Absent or Lys or Arg or Ser or Ala
  MISC_FEATURE (1473)..(1473): Absent or Arg or Lys or Ser
  MISC_FEATURE (1474)..(1474): Absent or Leu or Arg
  MISC_FEATURE (1475)..(1475): Absent or Asn
  MISC_FEATURE (1476)..(1476): Absent or Lys or Glu or Arg or Trp
  MISC_FEATURE (1477)..(1477): Absent or Leu or Arg or Lys or Asn
  MISC_FEATURE (1478)..(1478): Absent or Met or Leu or Ile or Gln
  MISC_FEATURE (1479)..(1479): Absent or Ile or Phe or Glu
  MISC_FEATURE (1480)..(1480): Absent or Asp or Pro or Gly or Asn
  MISC_FEATURE (1481)..(1481): Absent or Ser or Leu or Lys
  MISC_FEATURE (1482)..(1482): Absent or Pro or Asp or Glu or Cys
  MISC_FEATURE (1483)..(1483): Absent or His or Gln or Met or Pro
  MISC_FEATURE (1484)..(1484): Absent or Leu or Arg or Pro or Asp
  MISC_FEATURE (1485)..(1485): Absent or Thr or Gln or Tyr
  MISC_FEATURE (1486)..(1486): Absent or Lys or Arg or Met
  MISC_FEATURE (1487)..(1487): Absent or Val or Leu or Met or Ile
  MISC_FEATURE (1488)..(1488): Absent or Glu or Ala or Arg or Lys
  MISC_FEATURE (1489)..(1489): Absent or Glu or Lys or Thr or Ala
  MISC_FEATURE (1490)..(1490): Absent or Ser or Ala or Glu
  MISC_FEATURE (1491)..(1491): Absent or Leu or Val or Glu
  MISC_FEATURE (1492)..(1492): Absent or Ser or Asn
  MISC_FEATURE (1493)..(1493): Absent or Tyr or Gln or Leu
  MISC_FEATURE (1494)..(1494): Absent or Ile or Met or Arg
  MISC_FEATURE (1495)..(1495): Absent or Phe or Ser or Glu or Leu
  MISC_FEATURE (1496)..(1496): Absent or Lys or Asp or Arg or Glu
  MISC_FEATURE (1497)..(1497): Absent or Val or Lys
  MISC_FEATURE (1498)..(1498): Absent or Leu or Val or Glu
  MISC_FEATURE (1499)..(1499): Absent or Asn or Ala or Lys or Arg
  MISC_FEATURE (1500)..(1500): Absent or Phe or Thr or Leu or Val
  MISC_FEATURE (1501)..(1501): Absent or Leu or Ala or Thr
  MISC_FEATURE (1502)..(1502): Absent or Lys or Arg or Asn
  MISC_FEATURE (1503)..(1503): Absent or Pro or Phe or Ala or Tyr
  MISC_FEATURE (1504)..(1504): Absent or Leu or Phe
  MISC_FEATURE (1505)..(1505): Absent or Gly or Lys or His
  MISC_FEATURE (1506)..(1506): Absent or Val or Ile or Ser
  MISC_FEATURE (1507)..(1507): Absent or Thr or Gln or Ser
  MISC_FEATURE (1508)..(1508): Absent or Arg or His or Thr
  MISC_FEATURE (1509)..(1509): Absent or Asn or Arg or Gln or Glu
  MISC_FEATURE (1510)..(1510): Absent or Val or Phe or Leu or Pro
  MISC_FEATURE (1511)..(1511): Absent or Val or Leu or Tyr or Lys
  MISC_FEATURE (1512)..(1512): Absent or Val or Phe or Leu
  MISC_FEATURE (1513)..(1513): Absent or Ser or Met or Val
  MISC_FEATURE (1514)..(1514): Absent or Pro or Ala
  MISC_FEATURE (1515)..(1515): Absent or Leu or Lys
  MISC_FEATURE (1516)..(1516): Absent or Ser or Leu or Cys or Val
  MISC_FEATURE (1517)..(1517): Absent or Asn or Ala or Val or Gln
  MISC_FEATURE (1518)..(1518): Absent or Tyr or Gln or Asn
  MISC_FEATURE (1519)..(1519): Absent or Asn or Ser or Glu
  MISC_FEATURE (1520)..(1520): Absent or Ser or Phe or Leu
  MISC_FEATURE (1521)..(1521): Absent or Ala or Ser or Glu or Leu
  MISC_FEATURE (1522)..(1522): Absent or Phe or Leu or Val
  MISC_FEATURE (1523)..(1523): Absent or Tyr or Val
  MISC_FEATURE (1524)..(1524): Absent or Lys or Arg or Asp or Val
  MISC_FEATURE (1525)..(1525): Absent or Gly or Ala
  MISC_FEATURE (1526)..(1526): Absent or Gly or Lys
  MISC_FEATURE (1527)..(1527): Absent or Ile or Val or Leu or Gln
  MISC_FEATURE (1528)..(1528): Absent or Met or Leu
  MISC_FEATURE (1529)..(1529): Absent or Phe or Ile
  MISC_FEATURE (1530)..(1530): Absent or Gln or Thr or Glu
  MISC_FEATURE (1531)..(1531): Absent or Ala or Val or Asn
  MISC_FEATURE (1532)..(1532): Absent or Ile or Val or Glu
  MISC_FEATURE (1533)..(1533): Absent or Tyr or Arg or Asn or His
  MISC_FEATURE (1534)..(1534): Absent or Asp
  MISC_FEATURE (1535)..(1535): Absent or Ser or Ala or Leu
  MISC_FEATURE (1536)..(1536): Absent or Gly or Ala
  MISC_FEATURE (1537)..(1537): Absent or Arg or Lys or Glu or Cys
  MISC_FEATURE (1538)..(1538): Absent or Val or Arg or Lys
  MISC_FEATURE (1539)..(1539): Absent or Lys or Arg or Ser or Ala
  MISC_FEATURE (1540)..(1540): Absent or Ser or Asp or Glu or Leu
  MISC_FEATURE (1541)..(1541): Absent or Leu or Val
  MISC_FEATURE (1542)..(1542): Absent or Leu or Val or Ile or Arg
  MISC_FEATURE (1543)..(1543): Absent or Ala or Cys or Asp
  MISC_FEATURE (1544)..(1544): Absent or Ala or Asp
  MISC_FEATURE (1545)..(1545): Absent or Gly or Lys
  MISC_FEATURE (1546)..(1546): Absent or Gly or Met
  MISC_FEATURE (1547)..(1547): Absent or Arg or Asp
  MISC_FEATURE (1548)..(1548): Absent or Tyr or Asp
  MISC_FEATURE (1549)..(1549): Absent or Asp or Leu
  MISC_FEATURE (1550)..(1550): Absent or Asn or Gly or Lys or Ala
  MISC_FEATURE (1551)..(1551): Absent or Leu or Arg
  MISC_FEATURE (1552)..(1552): Absent or Ile or Leu or Val or Met
  MISC_FEATURE (1553)..(1553): Absent or Ser or Lys or Arg or Tyr
  MISC_FEATURE (1554)..(1554): Absent or Tyr or His or Phe or Arg
  MISC_FEATURE (1555)..(1555): Absent or Ile or Phe or Leu
  MISC_FEATURE (1556)..(1556): Absent or Ala or Asp or Tyr
  MISC_FEATURE (1557)..(1557): Absent or Arg or Asn or Pro or His
  MISC_FEATURE (1558)..(1558): Absent or Pro
  MISC_FEATURE (1559)..(1559): Absent or Ser or Leu or Ile
  MISC_FEATURE (1560)..(1560): Absent or Gly or Thr or Met or Pro
  MISC_FEATURE (1561)..(1561): Absent or Gly or Ala or Arg or Gln
  MISC_FEATURE (1562)..(1562): Absent or Lys or Ser or Thr or Gly
  MISC_FEATURE (1563)..(1563): Absent or Ile or Ser or Ala or Leu
  MISC_FEATURE (1564)..(1564): Absent or Lys or Ala or Arg or Asp
  MISC_FEATURE (1565)..(1565): Absent or His or Pro or Lys
  MISC_FEATURE (1566)..(1566): Absent or Ile or Leu or Lys or Val
  MISC_FEATURE (1567)..(1567): Absent or Lys or His or Ala
  MISC_FEATURE (1568)..(1568): Absent or Arg or Gly or Val or Asp
  MISC_FEATURE (1569)..(1569): Absent or Ala or Val or Leu
  MISC_FEATURE (1570)..(1570): Absent or Val or Gly or Phe
  MISC_FEATURE (1571)..(1571): Absent or Gly or Val or Ile or Lys
  MISC_FEATURE (1572)..(1572): Absent or Phe or Gln or Cys
  MISC_FEATURE (1573)..(1573): Absent or Asn or Leu or Phe or His
  MISC_FEATURE (1574)..(1574): Absent or Leu or Ala or Ile
  MISC_FEATURE (1575)..(1575): Absent or Ala or Val or Leu or Thr
  MISC_FEATURE (1576)..(1576): Absent or Trp or Gly or Glu or Val
  MISC_FEATURE (1577)..(1577): Absent or Asp or Lys or Glu
  MISC_FEATURE (1578)..(1578): Absent or Thr or Leu or Gly
  MISC_FEATURE (1579)..(1579): Absent or Ile or Thr or Val or Ser
  MISC_FEATURE (1580)..(1580): Absent or Tyr or Leu or Phe or Ala
  MISC_FEATURE (1581)..(1581): Absent or Leu or Gly or Ser
  MISC_FEATURE (1582)..(1582): Absent or Ile or Leu or Met
  MISC_FEATURE (1583)..(1583): Absent or Val or Ser or Leu or Lys
  MISC_FEATURE (1584)..(1584): Absent or Gln or Lys or Arg
  MISC_FEATURE (1585)..(1585): Absent or Asn or Tyr or Ala
  MISC_FEATURE (1586)..(1586): Absent or Tyr or Gln or Ile or Thr
  MISC_FEATURE (1587)..(1587): Absent or Phe or Glu or Arg
  MISC_FEATURE (1588)..(1588): Absent or Lys or Val or Phe or Ala
  MISC_FEATURE (1589)..(1589): Absent or Leu or Gln or His or Ala
  MISC_FEATURE (1590)..(1590): Absent or Ala or Val or Asn or Thr
  MISC_FEATURE (1591)..(1591): Absent or Ser or Pro or Asp
  MISC_FEATURE (1592)..(1592): Absent or Gly or Lys
  MISC_FEATURE (1593)..(1593): Absent or Lys or Leu or Gln or Asn
  MISC_FEATURE (1594)..(1594): Absent or Gln or Leu or Ser or Tyr
  MISC_FEATURE (1595)..(1595): Absent or Thr or Ser or Val
  MISC_FEATURE (1596)..(1596): Absent or Lys or Arg or Leu
  MISC_FEATURE (1597)..(1597): Absent or Asn or Thr or His or Pro
  MISC_FEATURE (1598)..(1598): Absent or Arg or Glu or Ser or Gln
  MISC_FEATURE (1599)..(1599): Absent or Ser or Glu or Pro or Ala
  MISC_FEATURE (1600)..(1600): Absent or Arg or Glu or Ser or Ala
  MISC_FEATURE (1601)..(1601): Absent or Phe or Pro or Ser
  MISC_FEATURE (1602)..(1602): Absent or Leu or Thr
  MISC_FEATURE (1603)..(1603): Absent or Arg or Leu or Ser
  MISC_FEATURE (1604)..(1604): Absent or Glu or Arg or Lys or Gly
  MISC_FEATURE (1605)..(1605): Absent or Asn or Ser or Leu
  MISC_FEATURE (1606)..(1606): Absent or Ala or Phe or Val or Lys
  MISC_FEATURE (1607)..(1607): Absent or Ile or Gly or Val
  MISC_FEATURE (1608)..(1608): Absent or Glu or Leu or Pro or Gln
  MISC_FEATURE (1609)..(1609): Absent or Trp or Tyr or Asp
  MISC_FEATURE (1610)..(1610): Absent or Lys or Thr or Ala or Gln
  MISC_FEATURE (1611)..(1611): Absent or Pro or Val
  MISC_FEATURE (1612)..(1612): Absent or Lys or Arg or Leu
  MISC_FEATURE (1613)..(1613): Absent or Arg or Ile
  MISC_FEATURE (1614)..(1614): Absent or Cys or Val or Arg
  MISC_FEATURE (1615)..(1615): Absent or Asp or Gln
  MISC_FEATURE (1616)..(1616): Absent or Ile or Val or Leu
  MISC_FEATURE (1617)..(1617): Absent or Leu or Tyr or Ile
  MISC_FEATURE (1618)..(1618): Absent or Val or Asp
  MISC_FEATURE (1619)..(1619): Absent or Ala or Thr or Leu
  MISC_FEATURE (1620)..(1620): Absent or Ser or His
  MISC_FEATURE (1621)..(1621): Absent or Phe or Thr or Ile or Asp
  MISC_FEATURE (1622)..(1622): Absent or Ser or Pro or Gly or Lys
  MISC_FEATURE (1623)..(1623): Absent or Asp or Gly or Lys or Phe
  MISC_FEATURE (1624)..(1624): Absent or Ala or Asp or Met
  MISC_FEATURE (1625)..(1625): Absent or Ile or Leu or Ser or Val
  MISC_FEATURE (1626)..(1626): Absent or Leu or Ile or Tyr
  MISC_FEATURE (1627)..(1627): Absent or Asn or Glu or Leu or Val
  MISC_FEATURE (1628)..(1628): Absent or Ser or Thr or Glu or Asp
  MISC_FEATURE (1629)..(1629): Absent or Leu or Arg or Lys or Glu
  MISC_FEATURE (1630)..(1630): Absent or Gly
  MISC_FEATURE (1631)..(1631): Absent or Val or Met or Cys
  MISC_FEATURE (1632)..(1632): Absent or Arg or Glu or Ser or Phe
  MISC_FEATURE (1633)..(1633): Absent or Ile or Leu or Gln
  MISC_FEATURE (1634)..(1634): Absent or Val or Cys or Leu or Lys
  MISC_FEATURE (1635)..(1635): Absent or Asn or Arg or Gln or His
  MISC_FEATURE (1636)..(1636): Absent or Lys or Glu or Ser
  MISC_FEATURE (1637)..(1637): Absent or Leu
  MISC_FEATURE (1638)..(1638): Absent or Trp or Phe
  MISC_FEATURE (1639)..(1639): Absent or Lys or Ala or His
  MISC_FEATURE (1640)..(1640): Absent or Leu or His or Lys
  MISC_FEATURE (1641)..(1641): Absent or Gly or Asn or Ala
  MISC_FEATURE (1642)..(1642): Absent or Ile or Leu
  MISC_FEATURE (1643)..(1643): Absent or Ser or Ala or Gln or Lys
  MISC_FEATURE (1644)..(1644): Absent or Val or Ala or Glu
  MISC_FEATURE (1645)..(1645): Absent or Asp or Ala
  MISC_FEATURE (1646)..(1646): Absent or Leu or Ile or Phe
  MISC_FEATURE (1647)..(1647): Absent or Val or Gln or Glu
  MISC_FEATURE (1648)..(1648): Absent or Arg or Tyr or Leu or Val
  MISC_FEATURE (1649)..(1649): Absent or Glu or Arg or Phe
  MISC_FEATURE (1650)..(1650): Absent or His or Gly or Cys
  MISC_FEATURE (1651)..(1651): Absent or Ala or Asn
  MISC_FEATURE (1652)..(1652): Absent or Asn or Thr or Ser or Lys
  MISC_FEATURE (1653)..(1653): Absent or Cys or Tyr or Thr
  MISC_FEATURE (1654)..(1654): Absent or Tyr or Asp or Val
  MISC_FEATURE (1655)..(1655): Absent or Ser or Thr or Ala
  MISC_FEATURE (1656)..(1656): Absent or Val or Pro or Leu or Gly
  MISC_FEATURE (1657)..(1657): Absent or Glu or Val
  MISC_FEATURE (1658)..(1658): Absent or Asp or Ala or Glu or Ser
  MISC_FEATURE (1659)..(1659): Absent or Val or Ala or Ile or Ser
  MISC_FEATURE (1660)..(1660): Absent or Ile or Ala or Val
  MISC_FEATURE (1661)..(1661): Absent or Ser or Ala or Thr or Glu
  MISC_FEATURE (1662)..(1662): Absent or Ala or Thr or His or Ile
  MISC_FEATURE (1663)..(1663): Absent or Ala or Cys or Tyr or Leu
  MISC_FEATURE (1664)..(1664): Absent or Gln or Arg or Ala
  MISC_FEATURE (1665)..(1665): Absent or Ile or Ala or Ser or Thr
  MISC_FEATURE (1666)..(1666): Absent or Asp or Glu or Tyr
  MISC_FEATURE (1667)..(1667): Absent or Gly or Cys
  MISC_FEATURE (1668)..(1668): Absent or Cys or Ile or Asp
  MISC_FEATURE (1669)..(1669): Absent or Asp or Leu or Asn
  MISC_FEATURE (1670)..(1670): Absent or Trp or Leu or Ile
  MISC_FEATURE (1671)..(1671): Absent or Ile or Leu or Val
  MISC_FEATURE (1672)..(1672): Absent or Ile or Val or Leu or Lys
  MISC_FEATURE (1673)..(1673): Absent or Leu or Phe or Val or Thr
  MISC_FEATURE (1674)..(1674): Absent or Ile or Ala or Val or Gly
  MISC_FEATURE (1675)..(1675): Absent or Lys or Arg or Gly
  MISC_FEATURE (1676)..(1676): Absent or Gln or Ala or Gly
  MISC_FEATURE (1677)..(1677): Absent or Gln or Arg or Lys or Ile
  MISC_FEATURE (1678)..(1678): Absent or Asn or Ser or Glu
  MISC_FEATURE (1679)..(1679): Absent or Phe or Pro or Thr or Lys
  MISC_FEATURE (1680)..(1680): Absent or Ser or Val or Gln or Leu
  MISC_FEATURE (1681)..(1681): Absent or Ala or Leu or Met or Glu
  MISC_FEATURE (1682)..(1682): Absent or Ser or Lys or Glu or Asn
  MISC_FEATURE (1683)..(1683): Absent or Ser or Val or His or Glu
  MISC_FEATURE (1684)..(1684): Absent or His or Lys or Ser or Asp
  MISC_FEATURE (1685)..(1685): Absent or Lys or Val or Leu
  MISC_FEATURE (1686)..(1686): Absent or Arg or Val or Lys or Glu
  MISC_FEATURE (1687)..(1687): Absent or Lys or Leu or Ala
  MISC_FEATURE (1688)..(1688): Absent or Tyr or Gln or Arg or Thr
  MISC_FEATURE (1689)..(1689): Absent or Lys or Arg or Leu
  MISC_FEATURE (1690)..(1690): Absent or Pro or Ala or Glu
  MISC_FEATURE (1691)..(1691): Absent or Leu or Glu or Lys
  MISC_FEATURE (1692)..(1692): Absent or Arg or Tyr or Val
  MISC_FEATURE (1693)..(1693): Absent or Ile or Glu or Asn or Val
  MISC_FEATURE (1694)..(1694): Absent or Arg or Val or Ile or Lys
  MISC_FEATURE (1695)..(1695): Absent or Lys or Ala or Leu
  MISC_FEATURE (1696)..(1696): Absent or Leu or Arg or Lys
  MISC_FEATURE (1697)..(1697): Absent or Asp or His or Asn or Val
  MISC_FEATURE (1698)..(1698): Absent or Ser or Glu or Tyr
  MISC_FEATURE (1699)..(1699): Absent or Glu or Leu or Asp or Ile
  MISC_FEATURE (1700)..(1700): Absent or Ile or Val or Asp or Ser
  MISC_FEATURE (1701)..(1701): Absent or Asp or Gly or Glu
  MISC_FEATURE (1702)..(1702): Absent or Val or Phe or Ile or Lys
  MISC_FEATURE (1703)..(1703): Absent or Asp or Val or Arg
  MISC_FEATURE (1704)..(1704): Absent or Met or Gln or Phe or Leu
  MISC_FEATURE (1705)..(1705): Absent or Asp or Phe
  MISC_FEATURE (1706)..(1706): Absent or Leu or Arg or Glu or Ala
  MISC_FEATURE (1707)..(1707): Absent or Asp or Ile or Val or Glu
  MISC_FEATURE (1708)..(1708): Absent or Glu or Ala or Gly or Phe
  MISC_FEATURE (1709)..(1709): Absent or Phe or Lys or Met
  MISC_FEATURE (1710)..(1710): Absent or Ile or Gln or Trp or Arg
  MISC_FEATURE (1711)..(1711): Absent or Gln or Arg or Leu or Lys
  MISC_FEATURE (1712)..(1712): Absent or Leu or Ser or Lys
  MISC_FEATURE (1713)..(1713): Absent or Tyr or Ile or Gly or Gln
  MISC_FEATURE (1714)..(1714): Absent or Gln or Asp or Glu or Ala
  MISC_FEATURE (1715)..(1715): Absent or Gln or Val or Ile or Arg
  MISC_FEATURE (1716)..(1716): Absent or Glu or Gln or Asn or Arg
  MISC_FEATURE (1717)..(1717): Absent or Thr or Val or Glu or Leu
  MISC_FEATURE (1718)..(1718): Absent or Gly or Ala or Arg or Leu
  MISC_FEATURE (1719)..(1719): Absent or Ile or Gly or Lys or Phe
  MISC_FEATURE (1720)..(1720): Absent or Arg or Ser or Asp
  MISC_FEATURE (1721)..(1721): Absent or Ser or Gly or Asn or Arg
  MISC_FEATURE (1722)..(1722): Absent or Thr or Gly or Glu or Asn
  MISC_FEATURE (1723)..(1723): Absent or Ala or Ser or Gly
  MISC_FEATURE (1724)..(1724): Absent or Glu or Gly or Met or Asn
  MISC_FEATURE (1725)..(1725): Absent or Ile or Ala or Leu or Asp
  MISC_FEATURE (1726)..(1726): Absent or Leu or Val or Gln or Tyr
  MISC_FEATURE (1727)..(1727): Absent or Pro or Ala or Ser or His
  MISC_FEATURE (1728)..(1728): Absent or Ser or Ala or Lys or Glu
  MISC_FEATURE (1729)..(1729): Absent or Ser or Arg
  MISC_FEATURE (1730)..(1730): Absent or Glu or Phe or Ile or Ser
  MISC_FEATURE (1731)..(1731): Absent or Asn or Gly or Leu
  MISC_FEATURE (1732)..(1732): Absent or Ser or Asp or Leu
  MISC_FEATURE (1733)..(1733): Absent or Gln or Ala or Ser or Thr
  MISC_FEATURE (1734)..(1734): Absent or Ile or Thr or Ala or Lys
  MISC_FEATURE (1735)..(1735): Absent or Glu or Phe or Gln
  MISC_FEATURE (1736)..(1736): Absent or Glu or Asp or Gln or Lys
  MISC_FEATURE (1737)..(1737): Absent or Gly or Ala or Asp or Glu
  MISC_FEATURE (1738)..(1738): Absent or Thr or Ala or Val or Leu
  MISC_FEATURE (1739)..(1739): Absent or Ser or Ala or Leu
  MISC_FEATURE (1740)..(1740): Absent or Lys or Met or Gly
  MISC_FEATURE (1741)..(1741): Absent or Trp or Arg or Phe or Ala
  MISC_FEATURE (1742)..(1742): Absent or Glu or Ala or Val or Gln
  MISC_FEATURE (1743)..(1743): Absent or Glu or Ala or Asp or Phe
  MISC_FEATURE (1744)..(1744): Absent or Phe or Thr
  MISC_FEATURE (1745)..(1745): Absent or Ser or Ala
  MISC_FEATURE (1746)..(1746): Absent or Ser or Ala or Gln or Lys
  MISC_FEATURE (1747)..(1747): Absent or Ala or Ser or Met
  MISC_FEATURE (1748)..(1748): Absent or Asp or Ala or Asn or Glu
  MISC_FEATURE (1749)..(1749): Absent or Gly or Ala or Leu
  MISC_FEATURE (1750)..(1750): Absent or Ser or Pro or Asp or Met
  MISC_FEATURE (1751)..(1751): Absent or Gln or Gly or Val or Leu
  MISC_FEATURE (1752)..(1752): Absent or Asp or Ser or Gln or Thr
  MISC_FEATURE (1753)..(1753): Absent or Gly or Leu or Asp
  MISC_FEATURE (1754)..(1754): Absent or Gly or Ile or Met
  MISC_FEATURE (1755)..(1755): Absent or Ser or Gly or Thr
  MISC_FEATURE (1756)..(1756): Absent or Gly or Met or Leu
  MISC_FEATURE (1757)..(1757): Absent or Ile or His or Lys or Ala
  MISC_FEATURE (1758)..(1758): Absent or Ala or His or Asp or Lys
  MISC_FEATURE (1759)..(1759): Absent or Pro or His or Val or Glu
  MISC_FEATURE (1760)..(1760): Absent or Ile or His or Asn
  MISC_FEATURE (1761)..(1761): Absent or Gly or His or Asp or Gln
  MISC_FEATURE (1762)..(1762): Absent or Gln or Tyr or Arg or Thr
  MISC_FEATURE (1763)..(1763): Absent or Gln or Pro or Lys or Asn
  MISC_FEATURE (1764)..(1764): Absent or Lys or His or Tyr or Phe
  MISC_FEATURE (1765)..(1765): Absent or Val or Gly or Lys
  MISC_FEATURE (1766)..(1766): Absent or Val or Gly or Trp or Glu
  MISC_FEATURE (1767)..(1767): Absent or His or Phe or Lys
  MISC_FEATURE (1768)..(1768): Absent or Ile or Ser or His or Leu
  MISC_FEATURE (1769)..(1769): Absent or Pro or Arg or Lys or Ser
  MISC_FEATURE (1770)..(1770): Absent or Asn or Thr or Gln or Val
  MISC_FEATURE (1771)..(1771): Absent or Asn or Tyr
  MISC_FEATURE (1772)..(1772): Absent or Ser or Ala or Lys
  MISC_FEATURE (1773)..(1773): Absent or Ala or Met or Thr
  MISC_FEATURE (1774)..(1774): Absent or Arg or Asn or Lys
  MISC_FEATURE (1775)..(1775): Absent or Ala or Glu or Lys
  MISC_FEATURE (1776)..(1776): Absent or Lys or Val or Leu
  MISC_FEATURE (1777)..(1777): Absent or Ala or Lys or Tyr or Gly
  MISC_FEATURE (1778)..(1778): Absent or Lys or Pro or Asp or Met
  MISC_FEATURE (1779)..(1779): Absent or Ser or Leu or Asp
  MISC_FEATURE (1780)..(1780): Absent or Ala or Val or Phe
  MISC_FEATURE (1781)..(1781): Absent or Thr or Gln
  MISC_FEATURE (1782)..(1782): Absent or Ile or Ser or Val
  MISC_FEATURE (1783)..(1783): Absent or Ala or Thr
  MISC_FEATURE (1784)..(1784): Absent or Val or Ile
  MISC_FEATURE (1785)..(1785): Absent or Arg or Leu
  MISC_FEATURE (1786)..(1786): Absent or Glu or Thr
  MISC_FEATURE (1787)..(1787): Absent or Arg or Thr
  MISC_FEATURE (1788)..(1788): Absent or Glu or Gly
  MISC_FEATURE (1789)..(1789): Absent or Met or Phe
  MISC_FEATURE (1790)..(1790): Absent or Leu or Trp
  MISC_FEATURE (1791)..(1791): Absent or Leu or Pro
  MISC_FEATURE (1792)..(1792): Absent or Pro or Ser
  MISC_FEATURE (1793)..(1793): Absent or Glu or Tyr
  MISC_FEATURE (1794)..(1794): Absent or Arg or Lys
  MISC_FEATURE (1795)..(1795): Absent or Pro or Thr
  MISC_FEATURE (1796)..(1796): Absent or Ile or Thr
  MISC_FEATURE (1797)..(1797): Absent or Glu or Asp
  MISC_FEATURE (1798)..(1798): Absent or Arg or Leu
  MISC_FEATURE (1799)..(1799): Absent or Ser or Asn
  MISC_FEATURE (1800)..(1800): Absent or Lys or Leu
  MISC_FEATURE (1801)..(1801): Absent or Lys or Pro
  MISC_FEATURE (1802)..(1802): Absent or Gly or Ile
  MISC_FEATURE (1803)..(1803): Absent or Asp or Glu
  MISC_FEATURE (1804)..(1804): Absent or Lys or Met
  MISC_FEATURE (1805)..(1805): Absent or Ser or Val
  MISC_FEATURE (1806)..(1806): Absent or Gln or Asn
  MISC_FEATURE (1807)..(1807): Absent or Gln or Cys
  MISC_FEATURE (1808)..(1808): Absent or Asn or Val
  MISC_FEATURE (1809)..(1809): Absent or Arg or Glu
  MISC_FEATURE (1810)..(1810): Absent or Pro or Ala
  MISC_FEATURE (1811)..(1811): Absent or Lys or Phe
  MISC_FEATURE (1812)..(1812): Absent or Pro or Lys
  MISC_FEATURE (1813)..(1813): Absent or Ser or Ala
  MISC_FEATURE (1814)..(1814): Absent or Ser or Tyr
  MISC_FEATURE (1815)..(1815): Absent or Arg or Tyr
  MISC_FEATURE (1816)..(1816): Absent or Leu or Gly
  MISC_FEATURE (1817)..(1817): Absent or Leu or Thr
  MISC_FEATURE (1818)..(1818): Absent or Val or Lys
  MISC_FEATURE (1819)..(1819): Absent or Leu or Thr
  MISC_FEATURE (1820)..(1820): Absent or Asp or Asn
  MISC_FEATURE (1821)..(1821): Absent or Lys or Ser
  MISC_FEATURE (1822)..(1822): Absent or Ala or Arg
  MISC_FEATURE (1823)..(1823): Absent or Ser or Arg
  MISC_FEATURE (1824)..(1824): Absent or Arg or Leu
  MISC_FEATURE (1825)..(1825): Absent or Gln or Ser
  MISC_FEATURE (1826)..(1826): Absent or Val or Trp
  MISC_FEATURE (1827)..(1827): Absent or Ser or Ile
  MISC_FEATURE (1828)..(1828): Absent or Lys or Tyr
  MISC_FEATURE (1829)..(1829): Absent or Phe or Ser
  MISC_FEATURE (1830)..(1830): Absent or Ala or Leu
  MISC_FEATURE (1831)..(1831): Absent or Asp or Gly
  MISC_FEATURE (1832)..(1832): Absent or Gln or Thr
  MISC_FEATURE (1833)..(1833): Absent or Leu or Cys
  MISC_FEATURE (1834)..(1834): Absent or Gln or Ser
  MISC_FEATURE (1835)..(1835): Absent or Ser or Leu
  MISC_FEATURE (1836)..(1836): Absent or Gln or Gly or Glu or Ala
  MISC_FEATURE (1837)..(1837): Absent or Asn or Asp or Gly
  MISC_FEATURE (1838)..(1838): Absent or Lys or Val or Ala
  MISC_FEATURE (1839)..(1839): Absent or Lys or Pro or Ile or Phe
  MISC_FEATURE (1840)..(1840): Absent or Asp or Ile or Ala
  MISC_FEATURE (1841)..(1841): Absent or Lys or Leu
  MISC_FEATURE (1842)..(1842): Absent or Trp or Ala or Lys
  MISC_FEATURE (1843)..(1843): Absent or Val or Thr
  MISC_FEATURE (1844)..(1844): Absent or Phe or Asp or Ile
  MISC_FEATURE (1845)..(1845): Absent or Glu or Phe or Cys
  MISC_FEATURE (1846)..(1846): Absent or Glu or Thr or Asp or Ile
  MISC_FEATURE (1847)..(1847): Absent or Ser or Gly or Val
  MISC_FEATURE (1848)..(1848): Absent or Ala or Glu or Val
  MISC_FEATURE (1849)..(1849): Absent or Arg or Asn or Ala or Thr
  MISC_FEATURE (1850)..(1850): Absent or Asn or Phe or Met or Thr
  MISC_FEATURE (1851)..(1851): Absent or Ala or Asp or Glu or Tyr
  MISC_FEATURE (1852)..(1852): Absent or Ser or Arg or Lys or Gln
  MISC_FEATURE (1853)..(1853): Absent or Lys or Leu or Ala
  MISC_FEATURE (1854)..(1854): Absent or Ala or Arg
  MISC_FEATURE (1855)..(1855): Absent or Ile or Ala or Ser or Val
  MISC_FEATURE (1856)..(1856): Absent or Val or Ala or Thr or Leu
  MISC_FEATURE (1857)..(1857): Absent or His or Leu or Thr
  MISC_FEATURE (1858)..(1858): Absent or Ser or Thr or Leu
  MISC_FEATURE (1859)..(1859): Absent or Leu or Ala or Phe
  MISC_FEATURE (1860)..(1860): Absent or Ser or Cys or Asp or Asn
  MISC_FEATURE (1861)..(1861): Absent or Ser or Leu or Glu or Asn
  MISC_FEATURE (1862)..(1862): Absent or Ala or Gly or Glu or Thr
  MISC_FEATURE (1863)..(1863): Absent or Pro or Ser or Glu
  MISC_FEATURE (1864)..(1864): Absent or Val or His or Arg
  MISC_FEATURE (1865)..(1865): Absent or Phe or Gly or Leu
  MISC_FEATURE (1866)..(1866): Absent or Ser or Glu
  MISC_FEATURE (1867)..(1867): Absent or Val or Arg or Tyr
  MISC_FEATURE (1868)..(1868): Absent or Asp or Gly or Thr
  MISC_FEATURE (1869)..(1869): Absent or Ala or Tyr or Glu
  MISC_FEATURE (1870)..(1870): Absent or Ile or Gly
  MISC_FEATURE (1871)..(1871): Absent or Arg or Ala or Leu
  MISC_FEATURE (1872)..(1872): Absent or Asp or Asn or Glu
  MISC_FEATURE (1873)..(1873): Absent or Glu or Gly or Gln
  MISC_FEATURE (1874)..(1874): Absent or Val or Asp or Leu
  MISC_FEATURE (1875)..(1875): Absent or Leu or Ala or Asn
  MISC_FEATURE (1876)..(1876): Absent or Glu or Gly or Leu
  MISC_FEATURE (1877)..(1877): Absent or Ile or Ser or Gly
  MISC_FEATURE (1878)..(1878): Absent or Ile or Gly or His
  MISC_FEATURE (1879)..(1879): Absent or Ser or Gly or Glu
  MISC_FEATURE (1880)..(1880): Absent or Ile or Thr or Asp
  MISC_FEATURE (1881)..(1881): Absent or Thr or Asp or Leu
  MISC_FEATURE (1882)..(1882): Absent or Ser or Gly or Ala
  MISC_FEATURE (1883)..(1883): Absent or Leu or Ser or Arg
  MISC_FEATURE (1884)..(1884): Absent or Ala or Glu or Leu
  MISC_FEATURE (1885)..(1885): Absent or Gln or Asp or Leu
  MISC_FEATURE (1886)..(1886): Absent or Lys or Glu or His
  MISC_FEATURE (1887)..(1887): Absent or Asp or Gly or Ser
  MISC_FEATURE (1888)..(1888): Absent or Glu or Ala or Leu
  MISC_FEATURE (1889)..(1889): Absent or Trp or Tyr or Ser
  MISC_FEATURE (1890)..(1890): Absent or Leu or Met or Cys
  MISC_FEATURE (1891)..(1891): Absent or Arg or Phe or Trp or Leu
  MISC_FEATURE (1892)..(1892): Absent or Lys or Arg
  MISC_FEATURE (1893)..(1893): Absent or Val or Ala or Arg or Tyr
  MISC_FEATURE (1894)..(1894): Absent or Phe or Leu or Lys
  MISC_FEATURE (1895)..(1895): Absent or Gly or Leu or Ile
  MISC_FEATURE (1896)..(1896): Absent or Ser or Glu or Leu
  MISC_FEATURE (1897)..(1897): Absent or Gly or Thr or Ser or Ile
  MISC_FEATURE (1898)..(1898): Absent or Ala or Leu or Cys or Lys
  MISC_FEATURE (1899)..(1899): Absent or Asn or Ser or Pro or Glu
  MISC_FEATURE (1900)..(1900): Absent or Ser or Ala or Pro
  MISC_FEATURE (1901)..(1901): Absent or Ala or Asp or Ser or Met
  MISC_FEATURE (1902)..(1902): Absent or Pro or Glu or Gln or Ser
  MISC_FEATURE (1903)..(1903): Absent or Arg
  MISC_FEATURE (1904)..(1904): Absent or Ser or Glu or Asn
  MISC_FEATURE (1905)..(1905): Absent or Phe or Tyr or Ile
  MISC_FEATURE (1906)..(1906): Absent or Ala or Met or Ser
  MISC_FEATURE (1907)..(1907): Absent or Thr or Arg or Gln or Asn
  MISC_FEATURE (1908)..(1908): Absent or Ser or Leu or Arg or Thr
  MISC_FEATURE (1909)..(1909): Absent or Ile or Leu or Asp
  MISC_FEATURE (1910)..(1910): Absent or Tyr or Lys or Gln or Thr
  MISC_FEATURE (1911)..(1911): Absent or Asn or Ala or Lys or Phe
  MISC_FEATURE (1912)..(1912): Absent or Ser or Arg or Lys or Glu
  MISC_FEATURE (1913)..(1913): Absent or Leu or Ala or Phe
  MISC_FEATURE (1914)..(1914): Absent or Ser or Ile or Val or Asn
  MISC_FEATURE (1915)..(1915): Absent or Lys or Ala or Thr or Ser
  MISC_FEATURE (1916)..(1916): Absent or Glu or Phe or Leu or Lys
  MISC_FEATURE (1917)..(1917): Absent or Ala or Phe
  MISC_FEATURE (1918)..(1918): Absent or Ala or Phe or Glu or Thr
  MISC_FEATURE (1919)..(1919): Absent or Lys or Pro or Gln or Asp
  MISC_FEATURE (1920)..(1920): Absent or Gly or Asp or Lys
  MISC_FEATURE (1921)..(1921): Absent or Thr or Ala or Lys or Met
  MISC_FEATURE (1922)..(1922): Absent or Lys or Thr or Arg
  MISC_FEATURE (1923)..(1923): Absent or Trp or Asn or Arg
  MISC_FEATURE (1924)..(1924): Absent or Ala or Ser or Val or Ile
  MISC_FEATURE (1925)..(1925): Absent or Ile or Ala or Trp or Arg
  MISC_FEATURE (1926)..(1926): Absent or Leu or Ile or Val
  MISC_FEATURE (1927)..(1927): Absent or His or Asn or Cys or Pro
  MISC_FEATURE (1928)..(1928): Absent or Cys or Thr or Ser or Leu
  MISC_FEATURE (1929)..(1929): Absent or His or Val or Phe or Pro
  MISC_FEATURE (1930)..(1930): Absent or Lys or Gly or Arg or Pro
  MISC_FEATURE (1931)..(1931): Absent or Thr or Cys or Met
  MISC_FEATURE (1932)..(1932): Absent or Gly or Asn or Asp
  MISC_FEATURE (1933)..(1933): Absent or Ser or Arg or Glu
  MISC_FEATURE (1934)..(1934): Absent or Ser or Val or Ile or Arg
  MISC_FEATURE (1935)..(1935): Absent or Cys or Phe or Tyr or Lys
  MISC_FEATURE (1936)..(1936): Absent or Val or Leu or Lys
  MISC_FEATURE (1937)..(1937): Absent or Val or Tyr or Ile
  MISC_FEATURE (1938)..(1938): Absent or Asp or Ser or Gly or Val
  MISC_FEATURE (1939)..(1939): Absent or Leu or Glu
  MISC_FEATURE (1940)..(1940): Absent or Gln or Arg or Lys or Asp
  MISC_FEATURE (1941)..(1941): Absent or Arg or Glu or Val
  MISC_FEATURE (1942)..(1942): Absent or Asp
  MISC_FEATURE (1943)..(1943): Absent or Arg or Lys
  MISC_FEATURE (1944)..(1944): Absent or Thr or Asp
  MISC_FEATURE (1945)..(1945): Absent or Ala or Arg
  MISC_FEATURE (1946)..(1946): Absent or Leu or Arg
  MISC_FEATURE (1947)..(1947): Absent or Ile or Tyr
  MISC_FEATURE (1948)..(1948): Absent or Gly or Ala
  MISC_FEATURE (1949)..(1949): Absent or Cys or Ile
  MISC_FEATURE (1950)..(1950): Absent or Gly or Asp
  MISC_FEATURE (1951)..(1951): Absent or Arg or Ala
  MISC_FEATURE (1952)..(1952): Absent or Ala
  MISC_FEATURE (1953)..(1953): Absent or Leu
  MISC_FEATURE (1954)..(1954): Absent or Val
  MISC_FEATURE (1955)..(1955): Absent or Arg
  MISC_FEATURE (1956)..(1956): Absent or Ile
  MISC_FEATURE (1957)..(1957): Absent or Met
  MISC_FEATURE (1958)..(1958): Absent or Lys
  MISC_FEATURE (1959)..(1959): Absent or Ser
  MISC_FEATURE (1960)..(1960): Absent or Arg
  MISC_FEATURE (1961)..(1961): Absent or Lys
  MISC_FEATURE (1962)..(1962): Absent or Val
  MISC_FEATURE (1963)..(1963): Absent or Leu
  MISC_FEATURE (1964)..(1964): Absent or Gly
  MISC_FEATURE (1965)..(1965): Absent or His
  MISC_FEATURE (1966)..(1966): Absent or Gln
  MISC_FEATURE (1967)..(1967): Absent or Gln
  MISC_FEATURE (1968)..(1968): Absent or Leu
  MISC_FEATURE (1969)..(1969): Absent or Val
  MISC_FEATURE (1970)..(1970): Absent or Ser
  MISC_FEATURE (1971)..(1971): Absent or Glu
  MISC_FEATURE (1972)..(1972): Absent or Cys
  MISC_FEATURE (1973)..(1973): Absent or Val
  MISC_FEATURE (1974)..(1974): Absent or Glu
  MISC_FEATURE (1975)..(1975): Absent or His
  MISC_FEATURE (1976)..(1976): Absent or Leu
  MISC_FEATURE (1977)..(1977): Absent or Ser
  MISC_FEATURE (1978)..(1978): Absent or Lys
  MISC_FEATURE (1979)..(1979): Absent or Met
  MISC_FEATURE (1980)..(1980): Absent or Phe
  MISC_FEATURE (1981)..(1981): Absent or Lys
  MISC_FEATURE (1982)..(1982): Absent or Pro
  MISC_FEATURE (1983)..(1983): Absent or Asp
  MISC_FEATURE (1984)..(1984): Absent or Ile
  MISC_FEATURE (1985)..(1985): Absent or Lys
  MISC_FEATURE (1986)..(1986): Absent or Met
  MISC_FEATURE (1987)..(1987): Absent or Ile
  MISC_FEATURE (1988)..(1988): Absent or Lys
  MISC_FEATURE (1989)..(1989): Absent or Lys
  MISC_FEATURE (1990)..(1990): Absent or Arg
  MISC_FEATURE (1991)..(1991): Absent or Ile
  MISC_FEATURE (1992)..(1992): Absent or Glu
  MISC_FEATURE (1993)..(1993): Absent or Asp
  MISC_FEATURE (1994)..(1994): Absent or Leu
  MISC_FEATURE (1995)..(1995): Absent or Ile
  MISC_FEATURE (1996)..(1996): Absent or Ser
  MISC_FEATURE (1997)..(1997): Absent or Arg
  MISC_FEATURE (1998)..(1998): Absent or Asp
  MISC_FEATURE (1999)..(1999): Absent or Tyr
  MISC_FEATURE (2000)..(2000): Absent or Leu
  MISC_FEATURE (2001)..(2001): Absent or Glu
  MISC_FEATURE (2002)..(2002): Absent or Arg
  MISC_FEATURE (2003)..(2003): Absent or Asp
  MISC_FEATURE (2004)..(2004): Absent or Thr
  MISC_FEATURE (2005)..(2005): Absent or Asp
  MISC_FEATURE (2006)..(2006): Absent or Asn
  MISC_FEATURE (2007)..(2007): Absent or Pro
  MISC_FEATURE (2008)..(2008): Absent or Asn
  MISC_FEATURE (2009)..(2009): Absent or Thr
  MISC_FEATURE (2010)..(2010): Absent or Phe
  MISC_FEATURE (2011)..(2011): Absent or Lys
  MISC_FEATURE (2012)..(2012): Absent or Tyr
  MISC_FEATURE (2013)..(2013): Absent or Leu
  MISC_FEATURE (2014)..(2014): Absent or Ala
XXXXXXXXXXXXXXXXXXXXXXXXXXXXXXXXXXXXXXXXXXXXXXXXXXXXXXXXXXXXXXXXXXXXXXXXXXXXXXXXXXXXXXXXXXXXXXXXXXXXXXXXXXXXXXXXXXXXXXXXXXXXXXXXXXXXXXXXXXXXXXXXXXXXXXXXXXXXXXXXXXXXXXXXXXXXXXXXXXXXXXXXXXXXXXXXXXXXXXXXXXXXXXXXXXXXXXXXXXXXXXXXXXXXXXXXXXXXXXXXXXXXXXXXXXXXXXXXXXXXXXXXXXXXXXXXXXXXXXXXXXXXXXXXXXXXXXXXXXXXXXXXXXXXXXXXXXXXXXXXXXXXXXXXXXXXXXXXXXXXXXXXXXXXXXXXXXXXXXXXXXXXXXXXXXXXXXXXXXXXXXXXXXXXXXXXXXXXXXXXXXXXXXXXXXXXXXXXXXXXXXXXXXXXXXXXXXXXXXXXXXXXXXXXXXXXXXXXXXXXXXXXXXXXXXXXXXXXXXXXXXXXXXXXXXXXXXXXXXXXXXXXXXXXXXXXXXXXXXXXXXXXXXXXXXXXXXXXXXXXXXXXXXXXXXXXXXXXXXXXXXXXXXXXXXXXXXXXXXXXXXXXXXXXXXXXXXXXXXXXPXXXXXXXXXXXXXXXXXXXXXXXXXXXXXXXXXXXXXXXXXXXXXXLSRYXXDFHEIEXXXXXXXXXXXXXXXXXXXIGXGXFSXVFKVXXRIDGCXYAVKXSXXXLXXXXXRRXXXAXXEVQAXAALXXHENXVXYXXSWXXXXXXXXXXXXXXXXXXXXXXXXXXXXXXXXXXXXXXXXXXXXXXXXXXXXXXXXXXXXXXXXXXXXXXXXXXXXXXXXXXXXXXXXXXXXXXXXXXXXXXXXXXXXXXXXXXXXXXXXXXXXXXXXXXXXXXXXXXXXXXXXXXXXXXXXXXXXXXXXXXXXXXXXXXXXXXXXXXXXXXXXXXXXXXXXXXXXXXXXXXXEXXXLYIQMELCXXXLXXXXXXXXXXXXXXXXXXXXXXXXXXXXQXXXXLXXXHXXXGXXHLDXKPXNIXXXXXXXXXXXXXXXXXXXXXXXXXXXXXXXXXXXXXKXGXDFGXAXXXXXXXXXXXXXXXXXXXXXXXXXXXXXXGXXXYXXXEXLXXXXXXXXXXXXXXDXXSLGXXXXEXXXXXXXXXXXXXXXXXXXXXXXXXXXXXXXXXXXXXXXXXXXXXXXXXXDPXXRPXXXXXXXXXXXXXXXXXXXXXXXXXXXXXXXXXXXXXXXXXXXXXXXXXXXXXXXXXXXXXXXXXXXXXXXXXXXXXXXXXXXXXXXXXXXXXXXXXXXXXXXXXXXXXXXXXXXXXXXXXXXXXXXXXXXXXXXXXXXXXXXXXXXXXXXXXXXXXXXXXXXXXXXXXXXXXXXXXXXXXXXXXXXXXXXXXXXXXXXXXXXXXXXXXXXXXXXXXXXXXXXXXXXXXXXXXXXXXXXXXXXXXXXXXXXXXXXXXXXXXXXXXXXXXXXXXXXXXXXXXXXXXXXXXXXXXXXXXXXXXXXXXXXXXXXXXXXXXXXXXXXXXXXXXXXXXXXXXXXXXXXXXXXXXXXXXXXXXXXXXXXXXXXXXXXXXXXXXXXXXXXXXXXXXXXXXXXXXXXXXXXXXXXXXXXXXXXXXXXXXXXXXXXXXXXXXXXXXXXXXXXXXXXXXXXXXXXXXXXXXXXXXXXXXXXXXXXXXXXXXXXXXXXXXXXXXXXXXXXXXXXXXXXXXXXXXXXXXXXXXXXXXXXXXXXXXXXXXXXXXXXXXXXXXXXXXXXXXXXXXXXXXXXXXXXXXXXXXXXXXXXXXXXXXXXXXXXXXXXXXXXXXXXXXXXXXXXXXXXXXXXXXXXXXXXXXXXXXXXXXXXXXXXXXXXXXXXXXXXXXXXXXXXXXXXXXXXXXXXXXXXXXXXXXXXXXXXXXXXXXXXXXXXXXXXXXXXXXXXXXXXXXXXXXXXXXXXXXXXXXXXXXXXXXXXXXXXXXXXXXXXXXXXXXXXXXXXXXXXXXXXXXXXXXXXXXXXXXXXXXXXXXXXXXXXXXXXXXXXXXXXXXXXXXXXX

SEQ ID NO: 17394 - protein, 1874 aa, Artificial
  Consensus of SEQ ID NO. 206 and its homologs
  MISC_FEATURE (1)..(1): Absent or Met
  MISC_FEATURE (2)..(2): Absent or Ser
  MISC_FEATURE (3)..(3): Absent or Val
  MISC_FEATURE (4)..(4): Absent or Asp
  MISC_FEATURE (5)..(5): Absent or Gln
  MISC_FEATURE (6)..(6): Absent or Lys
  MISC_FEATURE (7)..(7): Absent or Arg
  MISC_FEATURE (8)..(8): Absent or Cys
  MISC_FEATURE (9)..(9): Absent or Trp
  MISC_FEATURE (10)..(10): Absent or Ala
  MISC_FEATURE (11)..(11): Absent or Thr
  MISC_FEATURE (12)..(12): Absent or Leu
  MISC_FEATURE (13)..(13): Absent or Lys
  MISC_FEATURE (14)..(14): Absent or Glu
  MISC_FEATURE (15)..(15): Absent or Asn
  MISC_FEATURE (16)..(16): Absent or Asn
  MISC_FEATURE (17)..(17): Absent or Cys
  MISC_FEATURE (18)..(18): Absent or Val
  MISC_FEATURE (19)..(19): Absent or His
  MISC_FEATURE (20)..(20): Absent or Asp
  MISC_FEATURE (21)..(21): Absent or Glu
  MISC_FEATURE (22)..(22): Absent or Cys
  MISC_FEATURE (23)..(23): Absent or Arg
  MISC_FEATURE (24)..(24): Absent or Ser
  MISC_FEATURE (25)..(25): Absent or Met
  MISC_FEATURE (26)..(26): Absent or Cys
  MISC_FEATURE (27)..(27): Absent or Leu
  MISC_FEATURE (28)..(28): Absent or Lys
  MISC_FEATURE (29)..(29): Absent or Lys
  MISC_FEATURE (30)..(30): Absent or Asn
  MISC_FEATURE (31)..(31): Absent or Pro
  MISC_FEATURE (32)..(32): Absent or Lys
  MISC_FEATURE (33)..(33): Absent or Gly
  MISC_FEATURE (34)..(34): Absent or His
  MISC_FEATURE (35)..(35): Absent or Val
  MISC_FEATURE (36)..(36): Absent or Cys
  MISC_FEATURE (37)..(37): Absent or Phe
  MISC_FEATURE (38)..(38): Absent or Phe
  MISC_FEATURE (39)..(39): Absent or Gly
  MISC_FEATURE (40)..(40): Absent or Ser
  MISC_FEATURE (41)..(41): Absent or Val
  MISC_FEATURE (42)..(42): Absent or Asn
  MISC_FEATURE (43)..(43): Absent or Arg
  MISC_FEATURE (44)..(44): Absent or Lys
  MISC_FEATURE (45)..(45): Absent or Leu
  MISC_FEATURE (46)..(46): Absent or Asp
  MISC_FEATURE (47)..(47): Absent or Pro
  MISC_FEATURE (48)..(48): Absent or Val
  MISC_FEATURE (49)..(49): Absent or Ser
  MISC_FEATURE (50)..(50): Absent or Asp
  MISC_FEATURE (51)..(51): Absent or Leu
  MISC_FEATURE (52)..(52): Absent or Tyr
  MISC_FEATURE (53)..(53): Absent or Val
  MISC_FEATURE (54)..(54): Absent or Ile
  MISC_FEATURE (55)..(55): Absent or Gly
  MISC_FEATURE (56)..(56): Absent or Arg
  MISC_FEATURE (57)..(57): Absent or Ser
  MISC_FEATURE (58)..(58): Absent or Asp
  MISC_FEATURE (59)..(59): Absent or Leu
  MISC_FEATURE (60)..(60): Absent or Leu
  MISC_FEATURE (61)..(61): Absent or Cys
  MISC_FEATURE (62)..(62): Absent or Ile
  MISC_FEATURE (63)..(63): Absent or Phe
  MISC_FEATURE (64)..(64): Absent or Val
  MISC_FEATURE (65)..(65): Absent or Asn
  MISC_FEATURE (66)..(66): Absent or Tyr
  MISC_FEATURE (67)..(67): Absent or Ser
  MISC_FEATURE (68)..(68): Absent or Lys
  MISC_FEATURE (69)..(69): Absent or Glu
  MISC_FEATURE (70)..(70): Absent or Leu
  MISC_FEATURE (71)..(71): Absent or Leu
  MISC_FEATURE (72)..(72): Absent or Leu
  MISC_FEATURE (73)..(73): Absent or Asp
  MISC_FEATURE (74)..(74): Absent or Ile
  MISC_FEATURE (75)..(75): Absent or Cys
  MISC_FEATURE (76)..(76): Absent or Asp
  MISC_FEATURE (77)..(77): Absent or Ile
  MISC_FEATURE (78)..(78): Absent or Leu
  MISC_FEATURE (79)..(79): Absent or Glu
  MISC_FEATURE (80)..(80): Absent or Val
  MISC_FEATURE (81)..(81): Absent or Gln
  MISC_FEATURE (82)..(82): Absent or Phe
  MISC_FEATURE (83)..(83): Absent or Tyr
  MISC_FEATURE (84)..(84): Absent or Arg
  MISC_FEATURE (85)..(85): Absent or Val
  MISC_FEATURE (86)..(86): Absent or Gln
  MISC_FEATURE (87)..(87): Absent or Arg
  MISC_FEATURE (88)..(88): Absent or Arg
  MISC_FEATURE (89)..(89): Absent or Cys
  MISC_FEATURE (90)..(90): Absent or Ser
  MISC_FEATURE (91)..(91): Absent or Leu
  MISC_FEATURE (92)..(92): Absent or Glu
  MISC_FEATURE (93)..(93): Absent or Asp
  MISC_FEATURE (94)..(94): Absent or Trp
  MISC_FEATURE (95)..(95): Absent or Met
  MISC_FEATURE (96)..(96): Absent or Thr
  MISC_FEATURE (97)..(97): Absent or Lys
  MISC_FEATURE (98)..(98): Absent or Leu
  MISC_FEATURE (99)..(99): Absent or Leu
  MISC_FEATURE (100)..(100): Absent or Ser
  MISC_FEATURE (101)..(101): Absent or Asp
  MISC_FEATURE (102)..(102): Absent or Ile
  MISC_FEATURE (103)..(103): Absent or Glu
  MISC_FEATURE (104)..(104): Absent or Leu
  MISC_FEATURE (105)..(105): Absent or Ala
  MISC_FEATURE (106)..(106): Absent or Arg
  MISC_FEATURE (107)..(107): Absent or Ser
  MISC_FEATURE (108)..(108): Absent or Val
  MISC_FEATURE (109)..(109): Absent or Val
  MISC_FEATURE (110)..(110): Absent or Val
  MISC_FEATURE (111)..(111): Absent or Ala
  MISC_FEATURE (112)..(112): Absent or Ser
  MISC_FEATURE (113)..(113): Absent or Phe
  MISC_FEATURE (114)..(114): Absent or Leu
  MISC_FEATURE (115)..(115): Absent or Glu
  MISC_FEATURE (116)..(116): Absent or Leu
  MISC_FEATURE (117)..(117): Absent or Glu
  MISC_FEATURE (118)..(118): Absent or Ala
  MISC_FEATURE (119)..(119): Absent or Thr
  MISC_FEATURE (120)..(120): Absent or Ala
  MISC_FEATURE (121)..(121): Absent or Arg
  MISC_FEATURE (122)..(122): Absent or Ser
  MISC_FEATURE (123)..(123): Absent or Ala
  MISC_FEATURE (124)..(124): Absent or Cys
  MISC_FEATURE (125)..(125): Absent or Gln
  MISC_FEATURE (126)..(126): Absent or Val
  MISC_FEATURE (127)..(127): Absent or Val
  MISC_FEATURE (128)..(128): Absent or Asp
  MISC_FEATURE (129)..(129): Absent or Gln
  MISC_FEATURE (130)..(130): Absent or Asn
  MISC_FEATURE (131)..(131): Absent or Ala
  MISC_FEATURE (132)..(132): Absent or Ser
  MISC_FEATURE (133)..(133): Absent or Asp
  MISC_FEATURE (134)..(134): Absent or Ser
  MISC_FEATURE (135)..(135): Absent or Asn
  MISC_FEATURE (136)..(136): Absent or Asp
  MISC_FEATURE (137)..(137): Absent or Asp
  MISC_FEATURE (138)..(138): Absent or Gly
  MISC_FEATURE (139)..(139): Absent or Asn
  MISC_FEATURE (140)..(140): Absent or Ser
  MISC_FEATURE (141)..(141): Absent or Thr
  MISC_FEATURE (142)..(142): Absent or Ser
  MISC_FEATURE (143)..(143): Absent or Leu
  MISC_FEATURE (144)..(144): Absent or Ser
  MISC_FEATURE (145)..(145): Absent or Ser
  MISC_FEATURE (146)..(146): Absent or Leu
  MISC_FEATURE (147)..(147): Absent or Val
  MISC_FEATURE (148)..(148): Absent or His
  MISC_FEATURE (149)..(149): Absent or Pro
  MISC_FEATURE (150)..(150): Absent or Asn
  MISC_FEATURE (151)..(151): Absent or Ser
  MISC_FEATURE (152)..(152): Absent or Gly
  MISC_FEATURE (153)..(153): Absent or Gly
  MISC_FEATURE (154)..(154): Absent or Ser
  MISC_FEATURE (155)..(155): Absent or Ser
  MISC_FEATURE (156)..(156): Absent or Leu
  MISC_FEATURE (157)..(157): Absent or Leu
  MISC_FEATURE (158)..(158): Absent or Ser
  MISC_FEATURE (159)..(159): Absent or Ser
  MISC_FEATURE (160)..(160): Absent or Asp
  MISC_FEATURE (161)..(161): Absent or Tyr
  MISC_FEATURE (162)..(162): Absent or Gly
  MISC_FEATURE (163)..(163): Absent or Ser
  MISC_FEATURE (164)..(164): Absent or Asp
  MISC_FEATURE (165)..(165): Absent or Thr
  MISC_FEATURE (166)..(166): Absent or Ala
  MISC_FEATURE (167)..(167): Absent or Tyr
  MISC_FEATURE (168)..(168): Absent or Glu
  MISC_FEATURE (169)..(169): Absent or Thr
  MISC_FEATURE (170)..(170): Absent or Ser
  MISC_FEATURE (171)..(171): Absent or Glu
  MISC_FEATURE (172)..(172): Absent or Leu
  MISC_FEATURE (173)..(173): Absent or Gly
  MISC_FEATURE (174)..(174): Absent or Ser
  MISC_FEATURE (175)..(175): Absent or Ala
  MISC_FEATURE (176)..(176): Absent or Ser
  MISC_FEATURE (177)..(177): Absent or Leu
  MISC_FEATURE (178)..(178): Absent or Gly
  MISC_FEATURE (179)..(179): Absent or Gln
  MISC_FEATURE (180)..(180): Absent or Asp
  MISC_FEATURE (181)..(181): Absent or Asp
  MISC_FEATURE (182)..(182): Absent or Val
  MISC_FEATURE (183)..(183): Absent or Ser
  MISC_FEATURE (184)..(184): Absent or Glu
  MISC_FEATURE (185)..(185): Absent or Thr
  MISC_FEATURE (186)..(186): Absent or Asp
  MISC_FEATURE (187)..(187): Absent or Thr
  MISC_FEATURE (188)..(188): Absent or Gly
  MISC_FEATURE (189)..(189): Absent or Asp
  MISC_FEATURE (190)..(190): Absent or Leu
  MISC_FEATURE (191)..(191): Absent or Thr
  MISC_FEATURE (192)..(192): Absent or Leu
  MISC_FEATURE (193)..(193): Absent or Asp
  MISC_FEATURE (194)..(194): Absent or Glu
  MISC_FEATURE (195)..(195): Absent or Asp
  MISC_FEATURE (196)..(196): Absent or Leu
  MISC_FEATURE (197)..(197): Absent or Thr
  MISC_FEATURE (198)..(198): Absent or Asn
  MISC_FEATURE (199)..(199): Absent or Pro
  MISC_FEATURE (200)..(200): Absent or Thr
  MISC_FEATURE (201)..(201): Absent or Glu
  MISC_FEATURE (202)..(202): Absent or Lys
  MISC_FEATURE (203)..(203): Absent or Leu
  MISC_FEATURE (204)..(204): Absent or Val
  MISC_FEATURE (205)..(205): Absent or Lys
  MISC_FEATURE (206)..(206): Absent or Phe
  MISC_FEATURE (207)..(207): Absent or Ser
  MISC_FEATURE (208)..(208): Absent or Met
  MISC_FEATURE (209)..(209): Absent or Ser
  MISC_FEATURE (210)..(210): Absent or Asn
  MISC_FEATURE (211)..(211): Absent or Ile
  MISC_FEATURE (212)..(212): Absent or Asp
  MISC_FEATURE (213)..(213): Absent or Glu
  MISC_FEATURE (214)..(214): Absent or Gly
  MISC_FEATURE (215)..(215): Absent or Leu
  MISC_FEATURE (216)..(216): Absent or Ser
  MISC_FEATURE (217)..(217): Absent or Met
  MISC_FEATURE (218)..(218): Absent or Ser
  MISC_FEATURE (219)..(219): Absent or Gln
  MISC_FEATURE (220)..(220): Absent or Thr
  MISC_FEATURE (221)..(221): Absent or Ile
  MISC_FEATURE (222)..(222): Absent or Ile
  MISC_FEATURE (223)..(223): Absent or Glu
  MISC_FEATURE (224)..(224): Absent or Gln
  MISC_FEATURE (225)..(225): Absent or Leu
  MISC_FEATURE (226)..(226): Absent or Glu
  MISC_FEATURE (227)..(227): Absent or Asp
  MISC_FEATURE (228)..(228): Absent or Phe
  MISC_FEATURE (229)..(229): Absent or Pro
  MISC_FEATURE (230)..(230): Absent or Lys
  MISC_FEATURE (231)..(231): Absent or His
  MISC_FEATURE (232)..(232): Absent or Arg
  MISC_FEATURE (233)..(233): Absent or Val
  MISC_FEATURE (234)..(234): Absent or His
  MISC_FEATURE (235)..(235): Absent or Leu
  MISC_FEATURE (236)..(236): Absent or Gly
  MISC_FEATURE (237)..(237): Absent or Tyr
  MISC_FEATURE (238)..(238): Absent or Ala
  MISC_FEATURE (239)..(239): Absent or Asn
  MISC_FEATURE (240)..(240): Absent or Asp
  MISC_FEATURE (241)..(241): Absent or Ile
  MISC_FEATURE (242)..(242): Absent or Thr
  MISC_FEATURE (243)..(243): Absent or Glu
  MISC_FEATURE (244)..(244): Absent or Thr
  MISC_FEATURE (245)..(245): Absent or Asn
  MISC_FEATURE (246)..(246): Absent or Met or Ser
  MISC_FEATURE (247)..(247): Absent or Ser or Tyr
  MISC_FEATURE (248)..(248): Absent or Lys or Asn
  MISC_FEATURE (249)..(249): Absent or Ile or Gly
  MISC_FEATURE (250)..(250): Absent or Thr or Lys
  MISC_FEATURE (251)..(251): Absent or Tyr or Ala
  MISC_FEATURE (252)..(252): Absent or Ser
  MISC_FEATURE (253)..(253): Absent or Ile or Lys
  MISC_FEATURE (254)..(254): Absent or Phe or Gly
  MISC_FEATURE (255)..(255): Absent or Gly or Val
  MISC_FEATURE (256)..(256): Absent or Ser or Phe
  MISC_FEATURE (257)..(257): Absent or Ser or Arg
  MISC_FEATURE (258)..(258): Absent or Leu or Ala
  MISC_FEATURE (259)..(259): Absent or Val or Asn
  MISC_FEATURE (260)..(260): Absent or Glu or Asn
  MISC_FEATURE (261)..(261): Absent or Val or Asp
  MISC_FEATURE (262)..(262): Absent or Tyr or Leu
  MISC_FEATURE (263)..(263): Absent or Thr or Arg
  MISC_FEATURE (264)..(264): Absent or Gly or Cys
  MISC_FEATURE (265)..(265): Absent or Met or Arg
  MISC_FEATURE (266)..(266): Absent or Ser
  MISC_FEATURE (267)..(267): Absent or Met or Glu
  MISC_FEATURE (268)..(268): Absent or Tyr or Ser
  MISC_FEATURE (269)..(269): Absent or Lys or Glu
  MISC_FEATURE (270)..(270): Absent or Leu or Thr
  MISC_FEATURE (271)..(271): Absent or Leu or Ser
  MISC_FEATURE (272)..(272): Absent or Leu or His
  MISC_FEATURE (273)..(273): Absent or Ala or Ser
  MISC_FEATURE (274)..(274): Absent or Leu or Val
  MISC_FEATURE (275)..(275): Absent or Ala or Met
  MISC_FEATURE (276)..(276): Absent or Thr or His
  MISC_FEATURE (277)..(277): Absent or Leu or Asp
  MISC_FEATURE (278)..(278): Absent or Gln or Arg
  MISC_FEATURE (279)..(279): Absent or Leu or Lys
  MISC_FEATURE (280)..(280): Absent or Thr or Leu
  MISC_FEATURE (281)..(281): Absent or Cys or Ser
  MISC_FEATURE (282)..(282): Absent or Leu
  MISC_FEATURE (283)..(283): Absent or Pro or Glu
  MISC_FEATURE (284)..(284): Absent or Thr or Ser
  MISC_FEATURE (285)..(285): Absent or Cys or Ala
  MISC_FEATURE (286)..(286): Absent or Ser or Asp
  MISC_FEATURE (287)..(287): Absent or Leu or Gly
  MISC_FEATURE (288)..(288): Absent or Asn or Val
  MISC_FEATURE (289)..(289): Absent or Leu or Ser
  MISC_FEATURE (290)..(290): Absent or Phe or Leu
  MISC_FEATURE (291)..(291): Absent or Tyr or Leu
  MISC_FEATURE (292)..(292): Absent or His or Ala
  MISC_FEATURE (293)..(293): Absent or Ala or Gly
  MISC_FEATURE (294)..(294): Absent or Tyr or Glu
  MISC_FEATURE (295)..(295): Absent or Phe or Thr
  MISC_FEATURE (296)..(296): Absent or Glu or Ser
  MISC_FEATURE (297)..(297): Absent or Gly or Thr
  MISC_FEATURE (298)..(298): Absent or Pro or Ser
  MISC_FEATURE (299)..(299): Absent or Met or Ser
  MISC_FEATURE (300)..(300): Absent or Ala or Cys or Ile
  MISC_FEATURE (301)..(301): Absent or Glu or Pro or Leu
  MISC_FEATURE (302)..(302): Met or Absent or Val or Ala or Ser
  MISC_FEATURE (303)..(303): Ala or Absent or Glu or Tyr or Ser
  MISC_FEATURE (304)..(304): Ala or Met or Absent or Glu or His or Ile
  MISC_FEATURE (305)..(305): Ala or Met or Lys or Absent or Thr or Val
  MISC_FEATURE (306)..(306): Thr or Ser or Gly or Absent or Ile or Met or Cys or His or Ala or Glu
  MISC_FEATURE (307)..(307): Glu or Asp or Ala or Ser or Leu or Met or His or Absent or Val or Pro or Thr
  MISC_FEATURE (308)..(308): Arg or Thr or Pro or Leu or Absent or Ser or Asp or Asn or Gln or Lys or Glu
  MISC_FEATURE (309)..(309): Pro or Val or Leu or Ser or Thr or Met or Absent or Lys or Asn or Arg
  MISC_FEATURE (310)..(310): Phe or Ile or Tyr or Leu or Absent or Val or Thr or Asp or Ser or Pro
  MISC_FEATURE (311)..(311): Val or Leu or Tyr or Ile or Cys or Absent or Thr or Gly or Ser
  MISC_FEATURE (312)..(312): Leu or Phe or Absent or Met or Ile or Thr or Asn or Ser or Ala or Pro or Gln
  MISC_FEATURE (314)..(314): Gly or Absent or Ala or Asn or Asp or Thr or Ser
  MISC_FEATURE (315)..(315): Glu or Asp or Absent or Ala or Gly or Ile or Ser or Thr or Asn or Pro
  MISC_FEATURE (316)..(316): Ala or Ser or Thr or Glu or Arg or Gln or Absent or Val or Lys or Leu or Phe
  MISC_FEATURE (317)..(317): Ile or Val or Absent or Leu or Phe or Arg
  MISC_FEATURE (318)..(318): Asp or Pro or Absent or Ser or Ala or Gly or Asn
  MISC_FEATURE (319)..(319): Pro or Ser or Asp or Ile or Phe or Absent or Ala or Leu or Val or Lys or Asn or Gln
  MISC_FEATURE (320)..(320): Ser or His or Glu or Pro or Absent or Asp or Leu or Val or Ile or Thr or Tyr
  MISC_FEATURE (321)..(321): Leu or Tyr or Ile or Ser or Lys or Absent or Glu or Gln or Pro or Asn or Val
  MISC_FEATURE (322)..(322): Ile or Lys or Leu or Absent or Asp or Gly or Ala or Val or Cys
  MISC_FEATURE (324)..(324): Thr or Ser or Ala or Asn or Gln or Absent or Lys or Phe or Gly
  MISC_FEATURE (325)..(325): His or Ser or Asn or Asp or Absent or Pro or Thr
  MISC_FEATURE (326)..(326): Pro or Absent or Gly or Lys or Gln or Thr or Val
  MISC_FEATURE (327)..(327): Absent or Arg
  MISC_FEATURE (328)..(328): Absent or Ile
  MISC_FEATURE (329)..(329): Absent or Val
  MISC_FEATURE (330)..(330): Absent or Leu
  MISC_FEATURE (331)..(331): Absent or Pro
  MISC_FEATURE (332)..(332): Absent or Leu
  MISC_FEATURE (333)..(333): Absent or Lys
  MISC_FEATURE (334)..(334): Absent or Met
  MISC_FEATURE (335)..(335): Absent or His
  MISC_FEATURE (336)..(336): Absent or Ser
  MISC_FEATURE (337)..(337): Absent or Lys
  MISC_FEATURE (338)..(338): Absent or Leu
  MISC_FEATURE (339)..(339): Absent or Asn
  MISC_FEATURE (340)..(340): Absent or Arg
  MISC_FEATURE (341)..(341): Absent or Ile
  MISC_FEATURE (342)..(342): Absent or Leu
  MISC_FEATURE (343)..(343): Absent or Leu
  MISC_FEATURE (344)..(344): Absent or Thr
  MISC_FEATURE (345)..(345): Absent or Met
  MISC_FEATURE (346)..(346): Absent or Asn
  MISC_FEATURE (347)..(347): Absent or Glu
  MISC_FEATURE (348)..(348): Absent or Arg
  MISC_FEATURE (349)..(349): Absent or Leu
  MISC_FEATURE (350)..(350): Absent or Leu
  MISC_FEATURE (351)..(351): Absent or Asn
  MISC_FEATURE (352)..(352): Absent or Ser
  MISC_FEATURE (353)..(353): Absent or Lys
  MISC_FEATURE (354)..(354): Absent or Thr
  MISC_FEATURE (355)..(355): Absent or Asp
  MISC_FEATURE (356)..(356): Absent or Met
  MISC_FEATURE (357)..(357): Absent or Glu
  MISC_FEATURE (358)..(358): Absent or Asp
  MISC_FEATURE (359)..(359): Absent or Leu
  MISC_FEATURE (360)..(360): Absent or Ile
  MISC_FEATURE (361)..(361): Absent or Ala
  MISC_FEATURE (362)..(362): Absent or Arg
  MISC_FEATURE (363)..(363): Absent or Leu
  MISC_FEATURE (364)..(364): Absent or Asn
  MISC_FEATURE (365)..(365): Absent or Gln
  MISC_FEATURE (366)..(366): Absent or Glu
  MISC_FEATURE (367)..(367): Absent or Thr
  MISC_FEATURE (368)..(368): Absent or Ala
  MISC_FEATURE (369)..(369): Absent or Val
  MISC_FEATURE (370)..(370): Absent or Lys
  MISC_FEATURE (371)..(371): Absent or Glu
  MISC_FEATURE (372)..(372): Absent or Tyr
  MISC_FEATURE (373)..(373): Absent or Leu
  MISC_FEATURE (374)..(374): Absent or Asn
  MISC_FEATURE (375)..(375): Absent or Arg
  MISC_FEATURE (376)..(376): Absent or Lys
  MISC_FEATURE (377)..(377): Absent or Val
  MISC_FEATURE (378)..(378): Absent or Asp
  MISC_FEATURE (379)..(379): Absent or Asp
  MISC_FEATURE (380)..(380): Absent or Leu
  MISC_FEATURE (381)..(381): Lys or Asn or Ser or Ala or Asp or Absent or Glu
  MISC_FEATURE (382)..(382): Arg or Lys or Asn or Ala or Ile or Val or Leu or Absent or Thr
  MISC_FEATURE (383)..(383): Pro or Ser or Arg or Val or Thr or Absent or Lys or Glu or Ile
  MISC_FEATURE (385)..(385): Arg or Lys or Gly or Absent or Asp or Glu
  MISC_FEATURE (386)..(386): Leu or Pro or Absent or Val or Thr
  MISC_FEATURE (387)..(387): Gly or Absent or Pro or Asn or Thr or Ser or Ala
  MISC_FEATURE (388)..(388): Pro or Gln or Leu or Ile or Phe or Absent or Val or Glu or Ser or Lys or Asn or Asp
  MISC_FEATURE (389)..(389): Gly or Asn or Val or Ser or Leu or Absent or Tyr or Gln or Thr or Met
  MISC_FEATURE (390)..(390): Leu or Phe or Gln or Asp or Absent or Ser or Cys or Lys or Gly or Asn or Arg or Thr or Ile
  MISC_FEATURE (391)..(391): Arg or His or Gln or Ser or Asp or Absent or Asn or Lys or Thr
  MISC_FEATURE (392)..(392): His or Val or Leu or Lys or Thr or Pro or Absent
  MISC_FEATURE (393)..(393): Ile or Val or Leu or Lys or Pro or Absent or Gln or Asn or Glu
  MISC_FEATURE (394)..(394): Pro or Ser or Asp or Absent or Asn
  MISC_FEATURE (395)..(395): Pro or His or Gln or Arg or Absent or Leu
  MISC_FEATURE (396)..(396): Absent or Glu
  MISC_FEATURE (397)..(397): Absent or Gln
  MISC_FEATURE (398)..(398): Absent or Ala
  MISC_FEATURE (399)..(399): Absent or Leu
  MISC_FEATURE (400)..(400): Absent or Met
  MISC_FEATURE (401)..(401): Absent or Thr
  MISC_FEATURE (402)..(402): Absent or Glu
  MISC_FEATURE (403)..(403): Absent or Arg
  MISC_FEATURE (404)..(404): Absent or Gln
  MISC_FEATURE (405)..(405): Absent or Ser
  MISC_FEATURE (406)..(406): Absent or Val
  MISC_FEATURE (407)..(407): Absent or Thr
  MISC_FEATURE (408)..(408): Absent or Lys
  MISC_FEATURE (409)..(409): Absent or Met
  MISC_FEATURE (410)..(410): Absent or Gln
  MISC_FEATURE (411)..(411): Absent or Trp
  MISC_FEATURE (412)..(412): Absent or Asp
  MISC_FEATURE (413)..(413): Absent or Met
  MISC_FEATURE (414)..(414): Absent or Glu
  MISC_FEATURE (415)..(415): Absent or Glu
  MISC_FEATURE (416)..(416): Absent or Leu
  MISC_FEATURE (417)..(417): Absent or Arg
  MISC_FEATURE (418)..(418): Absent or Gln
  MISC_FEATURE (419)..(419): Absent or Lys
  MISC_FEATURE (420)..(420): Absent or Thr
  MISC_FEATURE (421)..(421): Asp or Asn or Ala or Pro or Glu or Thr or Absent or Ser or Phe
  MISC_FEATURE (422)..(422): Glu or Asp or Thr or Pro or Leu or Ala or Absent or Gln
  MISC_FEATURE (423)..(423): Absent or Ser or Gly or Glu or Gln or Asp or Thr or Lys or Met
  MISC_FEATURE (424)..(424): Absent or Pro or Thr or Ile or Ala or Val or Leu or Glu
  MISC_FEATURE (425)..(425): Absent or Ile or Thr or Val or Ser or Lys or Arg or Leu
  MISC_FEATURE (426)..(426): Absent or Pro or Val or Ser or Ala or Arg or Lys
  MISC_FEATURE (427)..(427): Absent or Ser or Ile or Thr or Val or Ala or Leu
  MISC_FEATURE (428)..(428): Absent or Ser or Lys or Thr or Val or His or Asn or Ala or Gly
  MISC_FEATURE (429)..(429): Absent or His or Ala or Thr or Ser or Gly
  MISC_FEATURE (431)..(431): Absent or Gly or Glu
  MISC_FEATURE (432)..(432): Absent or Ser or Asp
  MISC_FEATURE (433)..(433): Absent or Ser or Gly
  MISC_FEATURE (434)..(434): Absent or Ser
  MISC_FEATURE (435)..(435): Absent or Ser
  MISC_FEATURE (436)..(436): Absent or Asp
  MISC_FEATURE (437)..(437): Absent or Ser
  MISC_FEATURE (438)..(438): Absent or Lys
  MISC_FEATURE (439)..(439): Absent or Thr
  MISC_FEATURE (440)..(440): Absent or Ser
  MISC_FEATURE (441)..(441): Absent or Gly
  MISC_FEATURE (442)..(442): Absent or Asn
  MISC_FEATURE (443)..(443): Absent or Ser
  MISC_FEATURE (444)..(444): Absent or Thr
  MISC_FEATURE (445)..(445): Absent or Ser or Leu or Ile
  MISC_FEATURE (446)..(446): Absent or Ala or Thr or Arg or Ser or Leu or His
  MISC_FEATURE (447)..(447): Absent or Gln or Thr or Glu
  MISC_FEATURE (448)..(448): Absent or Gly or His or Asp or Ser or Glu
  MISC_FEATURE (449)..(449): Absent or Tyr or Asp or Gly or His or Ser or Asn or Cys
  MISC_FEATURE (450)..(450): Absent or Ile or Gly or Asp or Glu
  MISC_FEATURE (451)..(451): Ile or Leu or Absent or Ala or Ser or Val or Thr
  MISC_FEATURE (452)..(452): Val or Ile or Thr or Arg or Glu or Absent or Leu
  MISC_FEATURE (453)..(453): Pro or Ser or Ala or Leu or Arg or Val or Absent or Glu or Thr or Gln
  MISC_FEATURE (454)..(454): Thr or His or Leu or Absent or Val or Asn or Ser or Ala or Glu
  MISC_FEATURE (455)..(455): Val or Leu or Gln or Gly or Arg or Absent or Tyr or Thr or Met
  MISC_FEATURE (456)..(456): Ala or Thr or Met or Absent or Lys or Ser or Glu or Asp or Arg or Gly
  MISC_FEATURE (457)..(457): Gly or Leu or Asp or Absent or Pro or Glu or Ala or Thr or Arg
  MISC_FEATURE (458)..(458): Lys or Gln or Leu or Val or Absent or His or Pro or Gly or Thr
  MISC_FEATURE (459)..(459): Leu or Absent or Ser or Glu
  MISC_FEATURE (460)..(460): Val or Leu or Ser or Absent or Gly or Asp
  MISC_FEATURE (461)..(461): Val or Thr or Gln or Absent or Lys or Asn or Ser or Ala
  MISC_FEATURE (462)..(462): Asn or Asp or Absent or Gly or Lys or Ala or Val or Arg
  MISC_FEATURE (463)..(463): Pro or Arg or Asn or Absent or Lys or Thr or Gln or Ser or Leu or Phe
  MISC_FEATURE (464)..(464): Ala or Gln or Lys or Absent or Glu or Gly or Arg or Ser or Asn
  MISC_FEATURE (465)..(465): Lys or Arg or Absent or Asn or Gly or Thr or Ser or Phe or Leu or Tyr or Gln
  MISC_FEATURE (466)..(466): Pro or Asn or Lys or Ser or Gln or Absent or Val or Thr or Glu or Leu
  MISC_FEATURE (467)..(467): Ser or Ala or Asn or Gln or Absent or Thr or Arg or Lys or Asp
  MISC_FEATURE (468)..(468): Leu or Ile or Val or Ala or Lys or Absent or Ser or Thr or Gln
  MISC_FEATURE (469)..(469): Ser or Arg or Asn or Met or Leu or Val or Absent or Ala or Ile or Thr or Pro
  MISC_FEATURE (470)..(470): Leu or Val or Ile or Trp or Tyr or Absent or Phe or Gly or Asn or Ser or His
  MISC_FEATURE (471)..(471): Asp or Glu or Leu or Ile or Absent or Val or Thr or Gln or Lys or Arg
  MISC_FEATURE (472)..(472): Tyr or Asn or Thr or Ser or Asp or Glu or Absent or Leu or Arg
  MISC_FEATURE (473)..(473): Absent or Phe or Ser or Gly or Tyr or Trp or Cys
  MISC_FEATURE (474)..(474): Absent or Leu or Val or Ile
  MISC_FEATURE (475)..(475): Absent or Glu
  MISC_FEATURE (476)..(476): Absent or Leu
  MISC_FEATURE (477)..(477): Absent or Glu
  MISC_FEATURE (478)..(478): Absent or Ala
  MISC_FEATURE (479)..(479): Absent or Lys
  MISC_FEATURE (480)..(480): Absent or Ser
  MISC_FEATURE (481)..(481): Absent or Lys
  MISC_FEATURE (482)..(482): Absent or Ala
  MISC_FEATURE (483)..(483): Absent or Asp
  MISC_FEATURE (484)..(484): Absent or Ile
  MISC_FEATURE (485)..(485): Absent or Lys
  MISC_FEATURE (486)..(486): Absent or Val
  MISC_FEATURE (487)..(487): Absent or Leu
  MISC_FEATURE (488)..(488): Absent or Val
  MISC_FEATURE (489)..(489): Absent or Arg
  MISC_FEATURE (490)..(490): Absent or Glu
  MISC_FEATURE (491)..(491): Absent or Val
  MISC_FEATURE (492)..(492): Absent or Lys
  MISC_FEATURE (493)..(493): Absent or Ser
  MISC_FEATURE (494)..(494): Absent or Leu
  MISC_FEATURE (495)..(495): Absent or Arg
  MISC_FEATURE (496)..(496): Absent or Arg
  MISC_FEATURE (497)..(497): Absent or Ser
  MISC_FEATURE (498)..(498): Absent or His
  MISC_FEATURE (499)..(499): Absent or Met
  MISC_FEATURE (500)..(500): Absent or Glu
  MISC_FEATURE (501)..(501): Absent or Met
  MISC_FEATURE (502)..(502): Absent or Glu
  MISC_FEATURE (503)..(503): Absent or Lys
  MISC_FEATURE (504)..(504): Absent or Glu
  MISC_FEATURE (505)..(505): Absent or Leu
  MISC_FEATURE (506)..(506): Absent or Thr
  MISC_FEATURE (507)..(507): Absent or Arg
  MISC_FEATURE (508)..(508): Absent or Ser
  MISC_FEATURE (509)..(509): Absent or Leu
  MISC_FEATURE (510)..(510): Absent or Thr
  MISC_FEATURE (511)..(511): Absent or Glu
  MISC_FEATURE (512)..(512): Absent or Lys
  MISC_FEATURE (513)..(513): Absent or Ser
  MISC_FEATURE (514)..(514): Absent or Asp
  MISC_FEATURE (515)..(515): Absent or Thr
  MISC_FEATURE (516)..(516): Absent or Glu
  MISC_FEATURE (517)..(517): Absent or Lys
  MISC_FEATURE (518)..(518): Absent or Leu
  MISC_FEATURE (519)..(519): Absent or Leu
  MISC_FEATURE (520)..(520): Absent or Gln
  MISC_FEATURE (521)..(521): Absent or Gln
  MISC_FEATURE (522)..(522): Absent or Glu
  MISC_FEATURE (523)..(523): Absent or Arg
  MISC_FEATURE (524)..(524): Absent or Ile
  MISC_FEATURE (525)..(525): Absent or Ile
  MISC_FEATURE (526)..(526): Absent or Val
  MISC_FEATURE (527)..(527): Absent or Glu
  MISC_FEATURE (528)..(528): Absent or Asn
  MISC_FEATURE (529)..(529): Absent or Thr
  MISC_FEATURE (530)..(530): Absent or Leu
  MISC_FEATURE (531)..(531): Absent or Glu
  MISC_FEATURE (532)..(532): Absent or Ala
  MISC_FEATURE (533)..(533): Absent or Arg
  MISC_FEATURE (534)..(534): Absent or Arg
  MISC_FEATURE (535)..(535): Absent or Arg
  MISC_FEATURE (536)..(536): Absent or Leu
  MISC_FEATURE (537)..(537): Absent or Tyr
  MISC_FEATURE (538)..(538): Absent or Ser
  MISC_FEATURE (539)..(539): Absent or Asp
  MISC_FEATURE (540)..(540): Absent or Cys
  MISC_FEATURE (541)..(541): Absent or Glu
  MISC_FEATURE (542)..(542): Absent or Ile
  MISC_FEATURE (543)..(543): Absent or Leu
  MISC_FEATURE (544)..(544): Absent or His
  MISC_FEATURE (545)..(545): Absent or Asp
  MISC_FEATURE (546)..(546): Absent or Arg
  MISC_FEATURE (547)..(547): Absent or Leu
  MISC_FEATURE (548)..(548): Absent or Lys
  MISC_FEATURE (549)..(549): Absent or Val
  MISC_FEATURE (550)..(550): Absent or Asn
  MISC_FEATURE (551)..(551): Absent or Asn
  MISC_FEATURE (552)..(552): Absent or Thr
  MISC_FEATURE (553)..(553): Absent or Asn
  MISC_FEATURE (554)..(554): Absent or Leu
  MISC_FEATURE (555)..(555): Absent or Ser
  MISC_FEATURE (556)..(556): Absent or Met
  MISC_FEATURE (557)..(557): Absent or Asp
  MISC_FEATURE (558)..(558): Absent or Glu
  MISC_FEATURE (559)..(559): Absent or Gly or Ser or Thr or Asn
  MISC_FEATURE (561)..(561): Gly or Arg or Asn or Thr or Ser or Absent or Gln or His
  MISC_FEATURE (564)..(564): Absent or Glu
  MISC_FEATURE (565)..(565): Absent or Asp
  MISC_FEATURE (566)..(566): Absent or Leu
  MISC_FEATURE (567)..(567): Absent or Ser
  MISC_FEATURE (568)..(568): Absent or Glu
  MISC_FEATURE (569)..(569): Absent or Val
  MISC_FEATURE (570)..(570): Absent or Ser
  MISC_FEATURE (571)..(571): Absent or Asn
  MISC_FEATURE (572)..(572): Absent or Ala
  MISC_FEATURE (573)..(573): Absent or Leu
  MISC_FEATURE (574)..(574): Absent or Gln
  MISC_FEATURE (575)..(575): Absent or Asp
  MISC_FEATURE (576)..(576): Absent or Gln
  MISC_FEATURE (577)..(577): Absent or Ile
  MISC_FEATURE (578)..(578): Absent or Glu
  MISC_FEATURE (580)..(580): Val or Thr or Ile or Met or Absent or Lys
  MISC_FEATURE (582)..(582): Glu or Arg or Gln or Thr or Ala or Absent or Ser or His or Asn or Cys or Tyr
  MISC_FEATURE (583)..(583): Pro or Val or Thr or Gln or Absent or Glu or Ala
  MISC_FEATURE (584)..(584): Asn or Gly or Ser or Lys or Gln or Absent or Glu or Asp
  MISC_FEATURE (586)..(586): Leu or Gln or Ile or Asn or Phe or Absent or Tyr or Val or Thr or His or Ser
  MISC_FEATURE (588)..(588): Ile or Leu or Val or Absent
  MISC_FEATURE (590)..(590): Gln or Thr or Ile or Val or Absent
  MISC_FEATURE (591)..(591): Val or Ile or Absent or Met
  MISC_FEATURE (592)..(592): His or Gln or Ile or Thr or Val or Absent or Ser
  MISC_FEATURE (593)..(593): His or Arg or Ser or Ala or Thr or Gly or Absent or Asp
  MISC_FEATURE (594)..(594): Ser or Arg or Absent or Thr or Val or Ala or Lys or Cys or Tyr
  MISC_FEATURE (595)..(595): Ser or Ala or Phe or His or Absent or Ile or Arg or Lys
  MISC_FEATURE (596)..(596): Ala or Gly or Absent or Ser or Pro
  MISC_FEATURE (598)..(598): Phe or Tyr or Gly or Ser or Absent or Asn or Met
  MISC_FEATURE (599)..(599): His or Phe or Tyr or Absent or Leu
  MISC_FEATURE (600)..(600): Phe or His or Arg or Lys or Absent or Thr or Ile or Trp or Leu
  MISC_FEATURE (601)..(601): Val or Cys or Absent or Trp
  MISC_FEATURE (602)..(602): Thr or Met or Asp or Ser or Absent or Gln or Val or Leu or Ile or Trp
  MISC_FEATURE (603)..(603): Leu or Ile or Val or Absent or Asp or Thr
  MISC_FEATURE (604)..(604): Ala or Ser or Thr or Gly or Cys or Absent or Gln or Ile or Tyr
  MISC_FEATURE (605)..(605): Pro or Asp or Ser or Asn or Absent or Gly or Lys
  MISC_FEATURE (606)..(606): His or Tyr or Gln or Absent or Leu or Phe or Asn or Gly
  MISC_FEATURE (607)..(607): Thr or Ser or Ala or Absent or Pro
  MISC_FEATURE (608)..(608): Thr or Ala or Pro or His or Gln or Asn or Absent or Ser or Phe
  MISC_FEATURE (609)..(609): Asn or Pro or His or Ile or Met or Gly or Absent or Ser or Phe or Leu
  MISC_FEATURE (611)..(611): Leu or Gln or Phe or Val or Thr or Absent or Ser
  MISC_FEATURE (614)..(614): Val or Gln or Ala or Phe or Tyr or Absent or Met or Ile or Gly
  MISC_FEATURE (620)..(620): Ala or Val or Gly
  MISC_FEATURE (621)..(621): Thr or Ser or Asn
  MISC_FEATURE (623)..(623): Lys or Arg
  MISC_FEATURE (625)..(625): Arg or Lys or Ile or Tyr
  MISC_FEATURE (627)..(627): Val or Gln or Met or Asn or Lys or Thr or Absent
  MISC_FEATURE (628)..(628): Leu or Absent
  MISC_FEATURE (629)..(629): Pro or Ala or Lys or Asn or Gln or Absent
  MISC_FEATURE (630)..(630): Ala or Ser or Gly or Val or Asn or Thr or Ile or Lys or Arg
  MISC_FEATURE (631)..(631): Absent or Leu or Phe or Ile
  MISC_FEATURE (632)..(632): Absent or His or Gln or Glu or Lys
  MISC_FEATURE (633)..(633): Absent or Pro or Ala or Tyr or Ile
  MISC_FEATURE (634)..(634): Absent or Phe or Pro
  MISC_FEATURE (635)..(635): Absent or Ile or Trp
  MISC_FEATURE (636)..(636): Absent or Gly or Glu
  MISC_FEATURE (637)..(637): Absent or Leu
  MISC_FEATURE (638)..(638): Absent or Phe or Arg
  MISC_FEATURE (639)..(639): Absent or Met or Ala
  MISC_FEATURE (640)..(640): Absent or Ser or Val
  MISC_FEATURE (641)..(641): Absent or Ile or Thr
  MISC_FEATURE (642)..(642): Absent or Ile or Leu
  MISC_FEATURE (643)..(643): Absent or Gly or His
  MISC_FEATURE (644)..(644): Absent or Thr or Gly
  MISC_FEATURE (645)..(645): Absent or Phe or Ala
  MISC_FEATURE (646)..(646): Absent or Thr or Val
  MISC_FEATURE (647)..(647): Absent or Ser or Val
  MISC_FEATURE (648)..(648): Absent or Ser or Asp
  MISC_FEATURE (649)..(649): Absent or Gly or Val
  MISC_FEATURE (650)..(650): Absent or Val or Ala
  MISC_FEATURE (651)..(651): Absent or Glu or Phe
  MISC_FEATURE (652)..(652): Absent or Leu or Ser
  MISC_FEATURE (653)..(653): Absent or Ile or Glu
  MISC_FEATURE (654)..(654): Absent or Asn or Ile
  MISC_FEATURE (655)..(655): Absent or Ser
  MISC_FEATURE (656)..(656): Absent or Ile or Arg
  MISC_FEATURE (657)..(657): Absent or Ser or Arg
  MISC_FEATURE (658)..(658): Absent or Arg
  MISC_FEATURE (659)..(659): Absent or Ser
  MISC_FEATURE (660)..(660): Absent or Asn
  MISC_FEATURE (661)..(661): Absent or Arg
  MISC_FEATURE (662)..(662): Absent or Leu
  MISC_FEATURE (663)..(663): Absent or Lys
  MISC_FEATURE (664)..(664): Absent or Ser
  MISC_FEATURE (665)..(665): Absent or Trp
  MISC_FEATURE (666)..(666): Absent or Ala
  MISC_FEATURE (667)..(667): Absent or Glu
  MISC_FEATURE (668)..(668): Absent or Glu
  MISC_FEATURE (669)..(669): Absent or Gly
  MISC_FEATURE (670)..(670): Absent or Glu
  MISC_FEATURE (671)..(671): Absent or Gly
  MISC_FEATURE (672)..(672): Absent or Cys
  MISC_FEATURE (673)..(673): Absent or Gly
  MISC_FEATURE (674)..(674): Absent or Phe
  MISC_FEATURE (675)..(675): Absent or Leu
  MISC_FEATURE (676)..(676): Absent or Ser or Gly
  MISC_FEATURE (677)..(677): Absent or Gly
  MISC_FEATURE (678)..(678): Absent or Phe or Gly
  MISC_FEATURE (679)..(679): Absent or Ala or Glu
  MISC_FEATURE (680)..(680): Absent or Val or Asp
  MISC_FEATURE (681)..(681): Absent or Leu or Ala
  MISC_FEATURE (682)..(682): Absent or Ser
  MISC_FEATURE (683)..(683): Absent or Asp or Asn
  MISC_FEATURE (684)..(684): Absent or Asn or Leu
  MISC_FEATURE (685)..(685): Absent or Ile or Gly
  MISC_FEATURE (686)..(686): Absent or Val or Glu
  MISC_FEATURE (687)..(687): Absent or Val or Ile
  MISC_FEATURE (689)..(689): Ser or Ala or Glu or Asp or Thr or Gln or Absent
  MISC_FEATURE (691)..(691): Val or Cys or Absent or Leu or Ile
  MISC_FEATURE (696)..(696): Ala or Absent or Leu or Ser or Met or Cys or Val or Ile
  MISC_FEATURE (697)..(697): Ser or Leu or Absent or Ala or Thr or Gln or Asn or Lys
  MISC_FEATURE (699)..(699): Absent or Gly
  MISC_FEATURE (700)..(700): Absent or Leu
  MISC_FEATURE (701)..(701): Ser or Asn or Absent or Gly or Asp or Tyr or Glu or Ile or His
  MISC_FEATURE (702)..(702): Arg or Absent or Pro or Lys or Ile or Thr or Ser
  MISC_FEATURE (703)..(703): His or Absent or Gly or Asp or Glu or Ile
  MISC_FEATURE (704)..(704): Met or Absent or Ala or Val or Leu or Ile or Thr or Ser
  MISC_FEATURE (705)..(705): Asp or Absent or Glu or Asn
  MISC_FEATURE (706)..(706): Ala or Pro or Absent or Ile or Val or Thr or Lys
  MISC_FEATURE (709)..(709): Glu or Absent or Thr or Ser or Asp or Ala
  MISC_FEATURE (711)..(711): Phe or Val or Absent or Ile or Met or Leu or Thr
  MISC_FEATURE (713)..(713): Gln or Ala or Absent or Pro or Ser or Glu
  MISC_FEATURE (714)..(714): Thr or Ser or Absent or Ala or Asn or Gln or Ile
  MISC_FEATURE (715)..(715): Thr or Absent or Ser or Lys or Gly
  MISC_FEATURE (716)..(716): Gly or Absent or Arg or Lys
  MISC_FEATURE (717)..(717): Lys or Gln or Arg or Glu or Ala or Ser or Absent
  MISC_FEATURE (718)..(718): Ala or Ser or Glu or Asp or Absent
  MISC_FEATURE (719)..(719): Asp or Glu or Ala or Gly or Val or Leu or Lys or Absent
  MISC_FEATURE (720)..(720): Absent or Pro
  MISC_FEATURE (721)..(721): Absent or Gly
  MISC_FEATURE (722)..(722): Gly or Absent
  MISC_FEATURE (725)..(725): Pro or Glu or His or Leu or Gln or Ile or Val or Ala or Absent
  MISC_FEATURE (727)..(727): Asn or Ala or Thr or Lys or Glu or Asp or Arg or Absent
  MISC_FEATURE (728)..(728): Pro or Gly or Asn or Asp or Glu or Ser or Absent
  MISC_FEATURE (729)..(729): Pro or Absent or Gly or Ser
  MISC_FEATURE (730)..(730): Ala or Absent
  MISC_FEATURE (731)..(731): Ala or Absent
  MISC_FEATURE (732)..(732): Ala or Absent
  MISC_FEATURE (733)..(733): Ala or Absent
  MISC_FEATURE (734)..(734): Pro or Absent
  MISC_FEATURE (735)..(735): Gly or Absent
  MISC_FEATURE (736)..(736): Ala or Absent
  MISC_FEATURE (737)..(737): Gly or Absent
  MISC_FEATURE (738)..(738): Ala or Absent
  MISC_FEATURE (739)..(739): Val or Absent
  MISC_FEATURE (740)..(740): Ala or Absent
  MISC_FEATURE (741)..(741): Ala or Absent
  MISC_FEATURE (742)..(742): Ala or Absent
  MISC_FEATURE (743)..(743): Ala or Absent
  MISC_FEATURE (744)..(744): Pro or Absent
  MISC_FEATURE (745)..(745): Thr or Absent
  MISC_FEATURE (747)..(747): Thr or Met or Val or Phe or Tyr or Absent
  MISC_FEATURE (748)..(748): Val or Leu or Ile or Met or Cys or Thr or Absent
  MISC_FEATURE (750)..(750): Asn or Asp or Gly or Glu or Ser or Absent
  MISC_FEATURE (751)..(751): Val or Ile or Leu or Ala or Cys or Thr or Ser or Absent
  MISC_FEATURE (753)..(753): Leu or Val or Thr or Ile or Phe or Ser or Absent
  MISC_FEATURE (755)..(755): Met or Leu or His or Phe or Tyr or Gln or Absent
  MISC_FEATURE (756)..(756): Ala or Cys or Thr or Ser or Absent
  MISC_FEATURE (758)..(758): Arg or Lys or Gln or Tyr or Glu or Gly or Met or Ile or Absent
  MISC_FEATURE (761)..(761): Met or Ser or Lys or Leu or Asp or Phe or Arg or Gly or Asn or Glu or Absent
  MISC_FEATURE (762)..(762): Pro or Ala or Absent or Ser or Lys or Trp
  MISC_FEATURE (763)..(763): Gln or Lys or Gly or Ser or Absent or Pro or His
  MISC_FEATURE (764)..(764): Ala or Ser or Gly or Absent or Thr or Arg
  MISC_FEATURE (765)..(765): Glu or Val or Ser or Absent or Ala or Pro or Cys or Arg or Thr
  MISC_FEATURE (766)..(766): Arg or Gln or Absent or Ser or Pro or Thr or Cys
  MISC_FEATURE (767)..(767): Asp or Glu or Absent or Ser or Val or Lys or Pro or Ile
  MISC_FEATURE (768)..(768): Absent or Asp or Leu or Ile or Tyr
  MISC_FEATURE (769)..(769): Absent or Gln or Gly or Ser
  MISC_FEATURE (770)..(770): Absent or Gln
  MISC_FEATURE (771)..(771): Absent or Glu
  MISC_FEATURE (772)..(772): Absent or Gly
  MISC_FEATURE (773)..(773): Absent or Val or Pro or Arg or Lys or Gln or Asn
  MISC_FEATURE (774)..(774): Ala or Gly or Lys or Asn or Gln or Asp or Glu or Pro or Absent
  MISC_FEATURE (775)..(775): Gly or Arg or Absent or Asp or Ser or Ala or Asn or Lys
  MISC_FEATURE (776)..(776): Leu or Val or Asn or His or Ala or Tyr or Phe or Ser or Thr or Absent
  MISC_FEATURE (777)..(777): Val or Thr or Ile or Pro or Absent
  MISC_FEATURE (778)..(778): Val or Leu or Phe or Absent
  MISC_FEATURE (779)..(779): Leu or Absent or Gly or Arg
  MISC_FEATURE (780)..(780): Asp or Glu or Gln or Pro or Thr or Asn or Leu or Lys or Ser or Absent
  MISC_FEATURE (781)..(781): Ala or Glu or Thr or Lys or Ile or Leu or Val or Ser or Pro or Absent
  MISC_FEATURE (784)..(784): Ala or Asn or Lys or Ser or Glu or Arg or Thr or Absent
  MISC_FEATURE (785)..(785): Absent or Lys
  MISC_FEATURE (786)..(786): Absent or Leu
  MISC_FEATURE (787)..(787): Glu or Ala or Absent
  MISC_FEATURE (788)..(788): Gly or Ser or Lys or Absent
  MISC_FEATURE (789)..(789): Leu or Val or Tyr or Ile or Lys or His or Arg or Gly or Ser or Thr or Asn or Absent
  MISC_FEATURE (790)..(790): Ala or Gln or Gly or Ile or Phe or Val or Tyr or Thr or Cys or Leu or Absent
  MISC_FEATURE (791)..(791): Absent or Gly or Pro or Gln or Glu or Lys or Ser or Leu
  MISC_FEATURE (794)..(794): Thr or Ile or Leu or Val or Absent or Ala
  MISC_FEATURE (796)..(796): Val or Thr or Ile or Phe or Absent or Asp or Glu
  MISC_FEATURE (798)..(798): Arg or Lys or Met or Leu or Val or Ala or Ile or Absent or Cys
  MISC_FEATURE (801)..(801): Lys or Arg or Ile or Absent
  MISC_FEATURE (802)..(802): Val or Phe or Ile or Cys or Absent or Gln
  MISC_FEATURE (805)..(805): Ala or Asp or Asn or Lys or Ser or His or Absent or Glu
  MISC_FEATURE (806)..(806): Ser or Cys or Ala or Thr or Absent or Arg or Leu
  MISC_FEATURE (807)..(807): Absent or Ser or Gly
  MISC_FEATURE (808)..(808): Absent or Ala or Asn or Asp
  MISC_FEATURE (809)..(809): Absent or Gly or Ser or Leu
  MISC_FEATURE (810)..(810): Absent or Ile or Val or Cys
  MISC_FEATURE (811)..(811): Absent or Lys or Val
  MISC_FEATURE (812)..(812): Absent or Lys or Thr
  MISC_FEATURE (813)..(813): Absent or Gln or Glu or Leu
  MISC_FEATURE (814)..(814): Absent or Thr or Ala or Gly
  MISC_FEATURE (815)..(815): Absent or Asn or Glu
  MISC_FEATURE (816)..(816): Absent or Asp or Phe
  MISC_FEATURE (817)..(817): Absent or Ala or Gly or Ser
  MISC_FEATURE (818)..(818): Absent or Glu or Ser or His
  MISC_FEATURE (819)..(819): Absent or Asp or Asn or Ile
  MISC_FEATURE (820)..(820): Absent or Asp or Asn or Cys
  MISC_FEATURE (821)..(821): Absent or Asp or Asn or Leu
  MISC_FEATURE (822)..(822): Absent or Lys or Gln or Ala
  MISC_FEATURE (823)..(823): Absent or Glu or Asp or Ser
  MISC_FEATURE (824)..(824): Absent or Lys or Gln or Arg
  MISC_FEATURE (825)..(825): Absent or Gly or Arg
  MISC_FEATURE (826)..(826): Absent or Glu or Leu
  MISC_FEATURE (827)..(827): Absent or Asp or Ser
  MISC_FEATURE (828)..(828): Absent or Gln or Pro
  MISC_FEATURE (829)..(829): Absent or Glu or Ser
  MISC_FEATURE (830)..(830): Absent or Met or Gln
  MISC_FEATURE (831)..(831): Absent or Ile or Ser
  MISC_FEATURE (832)..(832): Absent or Asp or Gly
  MISC_FEATURE (833)..(833): Absent or Val or Met
  MISC_FEATURE (834)..(834): Absent or Thr
  MISC_FEATURE (835)..(835): Absent or Ser
  MISC_FEATURE (836)..(836): Absent or Ala
  MISC_FEATURE (837)..(837): Absent or Thr
  MISC_FEATURE (838)..(838): Absent or Gly
  MISC_FEATURE (839)..(839): Absent or Val
  MISC_FEATURE (840)..(840): Absent or Glu
  MISC_FEATURE (841)..(841): Absent or Lys
  MISC_FEATURE (842)..(842): Absent or Val
  MISC_FEATURE (843)..(843): Absent or Glu
  MISC_FEATURE (844)..(844): Absent or Val
  MISC_FEATURE (845)..(845): Absent or Trp
  MISC_FEATURE (846)..(846): Absent or Cys
  MISC_FEATURE (847)..(847): Absent or Gln
  MISC_FEATURE (848)..(848): Absent or Asp
  MISC_FEATURE (849)..(849): Absent or Leu
  MISC_FEATURE (850)..(850): Absent or Ala
  MISC_FEATURE (851)..(851): Absent or Met
  MISC_FEATURE (852)..(852): Absent or Gly
  MISC_FEATURE (853)..(853): Absent or Gly
  MISC_FEATURE (854)..(854): Absent or Arg
  MISC_FEATURE (855)..(855): Absent or Arg
  MISC_FEATURE (856)..(856): Absent or Val
  MISC_FEATURE (857)..(857): Absent or Glu
  MISC_FEATURE (858)..(858): Absent or Phe or Ile
  MISC_FEATURE (859)..(859): Absent or Asn
  MISC_FEATURE (860)..(860): Absent or Ala
  MISC_FEATURE (861)..(861): Absent or Asn
  MISC_FEATURE (862)..(862): Absent or Ser or Lys
  MISC_FEATURE (863)..(863): Absent or Ser or Glu or Cys
  MISC_FEATURE (864)..(864): Absent or Ser or Glu or Gly
  MISC_FEATURE (865)..(865): Absent or Gly or Glu or Ser or Asn or Thr
  MISC_FEATURE (866)..(866): Absent or Glu or Ala or Leu or His
  MISC_FEATURE (867)..(867): Glu or Asp or Arg or Lys or Pro or Ala or Thr or Ser or Asn or Absent
  MISC_FEATURE (868)..(868): Ser or Asn or Gly or Ala or Thr or Asp or Glu or Lys or Absent or Leu
  MISC_FEATURE (869)..(869): Val or Ile or Leu or Ala or Pro or Absent
  MISC_FEATURE (870)..(870): Pro or Lys or Ser or Gly or Arg or Ala or Absent or His or Gln
  MISC_FEATURE (871)..(871): Thr or Met or Ala or Glu or Asn or Tyr or Ser or Ile or Absent or Gly or Lys
  MISC_FEATURE (872)..(872): Leu or Val or Ile or Thr or Cys or Absent or Pro
  MISC_FEATURE (873)..(873): Val or Ile or Leu or Met or Absent or Tyr
  MISC_FEATURE (874)..(874): Leu or Ala or Lys or Glu or Cys or Val or Thr or Ile or Absent or Tyr
  MISC_FEATURE (875)..(875): Val or Ile or Met or Cys or Ala or Absent
  MISC_FEATURE (876)..(876): Gly or Cys or Lys or Tyr or Met or Ile or Phe or Ala or Ser or Absent or Asp
  MISC_FEATURE (877)..(877): Arg or Thr or Gln or Lys or Asn or Absent
  MISC_FEATURE (878)..(878): Ala or Cys or Absent or Ser or Thr or Ile
  MISC_FEATURE (879)..(879): Absent or Asp
  MISC_FEATURE (880)..(880): Absent or Thr
  MISC_FEATURE (881)..(881): Absent or Asn
  MISC_FEATURE (882)..(882): Absent or Glu
  MISC_FEATURE (883)..(883): Absent or Gln
  MISC_FEATURE (884)..(884): Absent or Lys
  MISC_FEATURE (885)..(885): Absent or Val
  MISC_FEATURE (886)..(886): Absent or Val
  MISC_FEATURE (887)..(887): Absent or His
  MISC_FEATURE (888)..(888): Absent or Tyr
  MISC_FEATURE (889)..(889): Absent or Gln
  MISC_FEATURE (890)..(890): Absent or Val
  MISC_FEATURE (891)..(891): Absent or Asn
  MISC_FEATURE (892)..(892): Absent or Cys
  MISC_FEATURE (893)..(893): Absent or Arg
  MISC_FEATURE (894)..(894): Absent or Pro
  MISC_FEATURE (895)..(895): Absent or Ala
  MISC_FEATURE (896)..(896): Absent or Arg
  MISC_FEATURE (897)..(897): Absent or Asp
  MISC_FEATURE (898)..(898): Absent or Arg
  MISC_FEATURE (899)..(899): Absent or Asn
  MISC_FEATURE (900)..(900): Absent or Thr
  MISC_FEATURE (901)..(901): Absent or Gly
  MISC_FEATURE (902)..(902): Absent or Ser
  MISC_FEATURE (903)..(903): Absent or Tyr
  MISC_FEATURE (904)..(904): Absent or Ser
  MISC_FEATURE (905)..(905): Absent or Val
  MISC_FEATURE (906)..(906): Absent or Lys
  MISC_FEATURE (907)..(907): Absent or His
  MISC_FEATURE (908)..(908): Absent or His
  MISC_FEATURE (909)..(909): Absent or Tyr
  MISC_FEATURE (910)..(910): Absent or Pro
  MISC_FEATURE (911)..(911): Absent or Ser
  MISC_FEATURE (912)..(912): Absent or Pro
  MISC_FEATURE (913)..(913): Absent or Ile
  MISC_FEATURE (914)..(914): Absent or Val
  MISC_FEATURE (915)..(915): Absent or Ser
  MISC_FEATURE (916)..(916): Absent or Trp
  MISC_FEATURE (917)..(917): Absent or Ile
  MISC_FEATURE (918)..(918): Absent or Glu
  MISC_FEATURE (919)..(919): Absent or Asp
  MISC_FEATURE (920)..(920): Absent or Leu
  MISC_FEATURE (921)..(921): Absent or Ser
  MISC_FEATURE (922)..(922): Absent or Ser
  MISC_FEATURE (923)..(923): Absent or Phe
  MISC_FEATURE (924)..(924): Absent or Gly
  MISC_FEATURE (925)..(925): Absent or Asn
  MISC_FEATURE (926)..(926): Absent or Val
  MISC_FEATURE (927)..(927): Absent or Ser
  MISC_FEATURE (928)..(928): Absent or Phe
  MISC_FEATURE (929)..(929): Absent or Ser
  MISC_FEATURE (930)..(930): Absent or Gln
  MISC_FEATURE (931)..(931): Absent or Asp
  MISC_FEATURE (932)..(932): Absent or Pro
  MISC_FEATURE (933)..(933): Leu or Val or Ile or Ala or Cys or Phe or Absent or Glu
  MISC_FEATURE (934)..(934): Ala or Gln or Arg or Thr or Ile or Leu or Met or Absent or Tyr
  MISC_FEATURE (935)..(935): Glu or Met or Arg or Asp or Gln or Thr or Lys or Ser or Absent or Ala or Ile
  MISC_FEATURE (936)..(936): Val or Thr or Ile or Asn or Ser or Lys or Arg or Absent or Ala or Cys or Leu or Glu or Asp
  MISC_FEATURE (937)..(937): Asp or Cys or Val or Ala or Ser or Absent or Glu
  MISC_FEATURE (938)..(938): Glu or Asp or Arg or Gln or Absent
  MISC_FEATURE (939)..(939): Lys or Glu or His or Phe or Asp or Thr or Gly or Absent or Ser
  MISC_FEATURE (940)..(940): Gly or Asn or Met or His or Trp or Asp or Val or Arg or Gln or Lys or Ile or Leu or Absent
  MISC_FEATURE (941)..(941): Leu or Ser or Ile or Pro or Lys or Asp or Asn or Thr or Absent
  MISC_FEATURE (942)..(942): Asp or Glu or Val or Ile or Gln or Pro or Thr or Gly or Absent or Ser
  MISC_FEATURE (943)..(943): Met or Val or Pro or Glu or Asp or Ser or Ala or Thr or Absent or Ile
  MISC_FEATURE (944)..(944): Asp or Glu or Gly or Thr or Val or Gln or Absent or Ala or Lys
  MISC_FEATURE (945)..(945): Ala or Asp or Glu or Gln or Val or Absent or Phe or Tyr or Ile or Leu
  MISC_FEATURE (946)..(946): Gln or Ile or Glu or Arg or Absent or Asp or Lys or His or Ser
  MISC_FEATURE (947)..(947): Arg or Lys or Glu or Absent or Thr or Asp or Ile or Gln or Ala or Ser
  MISC_FEATURE (948)..(948): Arg or Lys or Tyr or Ala or Asn or Absent or Thr or Ile or Glu or Met
  MISC_FEATURE (949)..(949): Absent or Gly
  MISC_FEATURE (950)..(950): Absent or Cys
  MISC_FEATURE (951)..(951): Absent or Ser
  MISC_FEATURE (952)..(952): Absent or Thr
  MISC_FEATURE (953)..(953): Absent or Val
  MISC_FEATURE (954)..(954): Absent or Val
  MISC_FEATURE (955)..(955): Absent or Leu
  MISC_FEATURE (956)..(956): Leu or Cys or Ile or Val or Absent or Ala or Ser
  MISC_FEATURE (957)..(957): Val or Ile or Lys or Glu or Absent or Asn or Ala or Asp
  MISC_FEATURE (958)..(958): Lys or Arg or Pro or Ser or Thr or Asp or Glu or Gln or Absent or Asn
  MISC_FEATURE (959)..(959): Lys or Glu or Arg or Leu or Ile or Absent or Val or Gln or Ala
  MISC_FEATURE (960)..(960): Leu or Ile or Asn or Val or Met or Absent or Phe or His
  MISC_FEATURE (961)..(961): Val or Ile or Glu or Leu or Lys or Arg or Ser or Absent or Asn or Asp or Gln or Ala
  MISC_FEATURE (962)..(962): Arg or Lys or His or Glu or Ala or Absent or Asp or Ser or Gly or Ile or Met
  MISC_FEATURE (963)..(963): Glu or Val or Gln or Leu or Tyr or Pro or Absent or Thr or Ile or Phe or Ser
  MISC_FEATURE (964)..(964): Met or Leu or Absent or Arg or Pro or Gly or Gln or Ser or His or Ile
  MISC_FEATURE (965)..(965): Ser or Absent or Gly or Lys or Glu or Thr or Asp or Asn
  MISC_FEATURE (966)..(966): Absent or Leu or Ile or Ser or Gly or Glu or Val or Asn or Asp
  MISC_FEATURE (967)..(967): Absent or Gly or Asp or Thr or Glu or Lys or Val or Arg
  MISC_FEATURE (968)..(968): Absent or Ala or Ser or Asp or Glu or Val or Leu
  MISC_FEATURE (969)..(969): Absent or Glu or Tyr or Thr
  MISC_FEATURE (970)..(970): Absent or Lys or Arg or Asp
  MISC_FEATURE (971)..(971): Absent or Leu or Glu
  MISC_FEATURE (972)..(972): Absent or Tyr or Phe
  MISC_FEATURE (973)..(973): Absent or Thr or Ile
  MISC_FEATURE (974)..(974): Absent or Lys or Glu
  MISC_FEATURE (975)..(975): Absent or Gly or Leu
  MISC_FEATURE (976)..(976): Absent or Leu or Ala
  MISC_FEATURE (977)..(977): Absent or Val or Lys
  MISC_FEATURE (978)..(978): Absent or Val or Glu
  MISC_FEATURE (979)..(979): Absent or Glu or Asn
  MISC_FEATURE (980)..(980): Absent or Glu or Thr
  MISC_FEATURE (981)..(981): Absent or Ser or Gly
  MISC_FEATURE (982)..(982): Absent or Leu or Asn
  MISC_FEATURE (983)..(983): Absent or Ser
  MISC_FEATURE (984)..(984): Absent or Asp
  MISC_FEATURE (985)..(985): Absent or Thr
  MISC_FEATURE (986)..(986): Absent or Lys
  MISC_FEATURE (987)..(987): Absent or Ile
  MISC_FEATURE (988)..(988): Absent or Ser
  MISC_FEATURE (989)..(989): Absent or Cys
  MISC_FEATURE (990)..(990): Absent or Ile
  MISC_FEATURE (991)..(991): Absent or Glu
  MISC_FEATURE (992)..(992): Absent or Val
  MISC_FEATURE (993)..(993): Absent or Glu
  MISC_FEATURE (994)..(994): Absent or Ser or Asn
  MISC_FEATURE (995)..(995): Absent or Met or Val
  MISC_FEATURE (996)..(996): Absent or Ala or Glu
  MISC_FEATURE (997)..(997): Absent or Leu or Thr
  MISC_FEATURE (998)..(998): Absent or Ile or Cys
  MISC_FEATURE (999)..(999): Absent or Arg or Gly
  MISC_FEATURE (1000)..(1000): Absent or Gly or Ile
  MISC_FEATURE (1001)..(1001): Absent or Leu
  MISC_FEATURE (1002)..(1002): Absent or Arg or Gly
  MISC_FEATURE (1003)..(1003): Absent or Glu or Ala
  MISC_FEATURE (1004)..(1004): Absent or Ser
  MISC_FEATURE (1005)..(1005): Absent or Phe
  MISC_FEATURE (1006)..(1006): Absent or Asp or Arg
  MISC_FEATURE (1007)..(1007): Absent or Leu or Asp
  MISC_FEATURE (1008)..(1008): Absent or Gly
  MISC_FEATURE (1009)..(1009): Absent or Ile or Thr
  MISC_FEATURE (1010)..(1010): Absent or Arg or Tyr
  MISC_FEATURE (1011)..(1011): Absent or Gln or Tyr
  MISC_FEATURE (1012)..(1012): Absent or Val
  MISC_FEATURE (1013)..(1013): Absent or Val or Thr
  MISC_FEATURE (1014)..(1014): Absent or Val or Met
  MISC_FEATURE (1015)..(1015): Absent or Tyr or Leu
  MISC_FEATURE (1016)..(1016): Absent or Cys or Ile
  MISC_FEATURE (1017)..(1017): Absent or Asp or Ile
  MISC_FEATURE (1018)..(1018): Absent or Asp or Pro
  MISC_FEATURE (1019)..(1019): Absent or Gln or Lys
  MISC_FEATURE (1020)..(1020): Absent or Leu or Gln
  MISC_FEATURE (1021)..(1021): Absent or Leu or Glu
  MISC_FEATURE (1022)..(1022): Absent or Tyr or Ala
  MISC_FEATURE (1023)..(1023): Absent or Gln or Thr
  MISC_FEATURE (1024)..(1024): Absent or Tyr or Ala
  MISC_FEATURE (1025)..(1025): Absent or Ile or His
  MISC_FEATURE (1026)..(1026): Absent or Val or Ser
  MISC_FEATURE (1027)..(1027): Absent or Gly or Cys
  MISC_FEATURE (1028)..(1028): Absent or Arg or Gln
  MISC_FEATURE (1029)..(1029): Absent or Gly or Ala
  MISC_FEATURE (1030)..(1030): Absent or Lys or Val
  MISC_FEATURE (1031)..(1031): Absent or Ile or Ser
  MISC_FEATURE (1032)..(1032): Absent or Lys or Glu
  MISC_FEATURE (1033)..(1033): Absent or Lys or Glu
  MISC_FEATURE (1034)..(1034): Absent or Lys or Glu
  MISC_FEATURE (1035)..(1035): Absent or Val or Ile
  MISC_FEATURE (1036)..(1036): Absent or Val or His
  MISC_FEATURE (1037)..(1037): Absent or His or Ala
  MISC_FEATURE (1038)..(1038): Absent or Leu or Ile
  MISC_FEATURE (1039)..(1039): Absent or Val or Leu
  MISC_FEATURE (1040)..(1040): Absent or Asp or Ser
  MISC_FEATURE (1041)..(1041): Absent or Glu
  MISC_FEATURE (1042)..(1042): Absent or Phe or Gln
  MISC_FEATURE (1043)..(1043): Absent or Gln or Ser
  MISC_FEATURE (1044)..(1044): Absent or Leu
  MISC_FEATURE (1045)..(1045): Absent or Leu or Tyr
  MISC_FEATURE (1046)..(1046): Absent or Leu or Pro
  MISC_FEATURE (1047)..(1047): Absent or Glu or Ala
  MISC_FEATURE (1048)..(1048): Absent or Glu or Gly
  MISC_FEATURE (1049)..(1049): Absent or Met or Trp
  MISC_FEATURE (1050)..(1050): Absent or Thr or Ile
  MISC_FEATURE (1051)..(1051): Absent or Tyr or His
  MISC_FEATURE (1052)..(1052): Absent or Thr
  MISC_FEATURE (1053)..(1053): Absent or Asp or His
  MISC_FEATURE (1054)..(1054): Absent or Ala or Pro
  MISC_FEATURE (1055)..(1055): Absent or Asp or Ser
  MISC_FEATURE (1056)..(1056): Absent or Leu or Gln
  MISC_FEATURE (1057)..(1057): Absent or Ile or Thr
  MISC_FEATURE (1058)..(1058): Absent or Ala or Cys
  MISC_FEATURE (1059)..(1059): Absent or Leu or Phe
  MISC_FEATURE (1060)..(1060): Absent or Asn or Leu
  MISC_FEATURE (1061)..(1061): Absent or Asp or Ser
  MISC_FEATURE (1062)..(1062): Absent or Val or Ser
  MISC_FEATURE (1063)..(1063): Absent or Asn
  MISC_FEATURE (1064)..(1064): Absent or Phe
  MISC_FEATURE (1065)..(1065): Absent or Ala
  MISC_FEATURE (1066)..(1066): Absent or Phe
  MISC_FEATURE (1067)..(1067): Absent or Lys
  MISC_FEATURE (1068)..(1068): Absent or Leu or Ile
  MISC_FEATURE (1069)..(1069): Absent or Ala or Asp
  MISC_FEATURE (1070)..(1070): Absent or Arg or Leu
  MISC_FEATURE (1071)..(1071): Absent or Glu or His
  MISC_FEATURE (1072)..(1072): Absent or Ala or Thr
  MISC_FEATURE (1073)..(1073): Absent or Ile or Gln
  MISC_FEATURE (1074)..(1074): Absent or Val or Tyr
  MISC_FEATURE (1075)..(1075): Absent or Ser
  MISC_FEATURE (1076)..(1076): Absent or Arg or Tyr
  MISC_FEATURE (1077)..(1077): Absent or Asp or Gln
  MISC_FEATURE (1078)..(1078): Absent or Asp or Val
  MISC_FEATURE (1079)..(1079): Absent or Val or Met
  MISC_FEATURE (1080)..(1080): Absent or Lys or Leu
  MISC_FEATURE (1081)..(1081): Absent or Ala or Pro
  MISC_FEATURE (1082)..(1082): Absent or Glu
  MISC_FEATURE (1083)..(1083): Absent or Ile or Ala
  MISC_FEATURE (1084)..(1084): Absent or Cys or Val
  MISC_FEATURE (1085)..(1085): Absent or Ser or Ala
  MISC_FEATURE (1086)..(1086): Absent or Ile
  MISC_FEATURE (1087)..(1087): Absent or Cys or Val
  MISC_FEATURE (1088)..(1088): Absent or Phe or Ile
  MISC_FEATURE (1089)..(1089): Absent or Glu or Ala
  MISC_FEATURE (1090)..(1090): Absent or Glu or Pro
  MISC_FEATURE (1091)..(1091): Absent or Thr
  MISC_FEATURE (1092)..(1092): Absent or Glu or Asp
  MISC_FEATURE (1093)..(1093): Absent or Gly or Pro
  MISC_FEATURE (1094)..(1094): Absent or Glu or Thr
  MISC_FEATURE (1095)..(1095): Absent or Arg
  MISC_FEATURE (1096)..(1096): Absent or Met or Gln
  MISC_FEATURE (1097)..(1097): Absent or Phe or Val
  MISC_FEATURE (1098)..(1098): Absent or Phe
  MISC_FEATURE (1099)..(1099): Absent or Thr or Tyr
  MISC_FEATURE (1100)..(1100): Absent or Thr or Gly
  MISC_FEATURE (1101)..(1101): Absent or Glu or Arg
  MISC_FEATURE (1102)..(1102): Absent or Lys or Asn
  MISC_FEATURE (1103)..(1103): Absent or Cys
  MISC_FEATURE (1104)..(1104): Absent or Val or Gly
  MISC_FEATURE (1105)..(1105): Absent or His
  MISC_FEATURE (1106)..(1106): Absent or Arg or Ile
  MISC_FEATURE (1107)..(1107): Absent or His or Phe
  MISC_FEATURE (1108)..(1108): Absent or Cys or Arg
  MISC_FEATURE (1109)..(1109): Absent or Phe or Leu
  MISC_FEATURE (1110)..(1110): Absent or Pro or Thr
  MISC_FEATURE (1111)..(1111): Absent or Cys or Asp
  MISC_FEATURE (1112)..(1112): Absent or Val or Pro
  MISC_FEATURE (1113)..(1113): Absent or Lys or Gly
  MISC_FEATURE (1114)..(1114): Absent or Gln or Gly
  MISC_FEATURE (1115)..(1115): Absent or Tyr or Met
  MISC_FEATURE (1116)..(1116): Absent or Val or Gly
  MISC_FEATURE (1117)..(1117): Absent or Glu or Val
  MISC_FEATURE (1118)..(1118): Absent or Val or Leu
  MISC_FEATURE (1119)..(1119): Absent or Lys or Arg
  MISC_FEATURE (1120)..(1120): Absent or Leu or Glu
  MISC_FEATURE (1121)..(1121): Absent or Leu or Cys
  MISC_FEATURE (1122)..(1122): Absent or Ser
  MISC_FEATURE (1123)..(1123): Absent or Gly or Glu
  MISC_FEATURE (1124)..(1124): Absent or Thr or Ser
  MISC_FEATURE (1125)..(1125): Absent or Val or Gly
  MISC_FEATURE (1126)..(1126): Absent or Pro or Phe
  MISC_FEATURE (1127)..(1127): Absent or Thr or His
  MISC_FEATURE (1128)..(1128): Absent or Cys or Ala
  MISC_FEATURE (1129)..(1129): Absent or Leu or His
  MISC_FEATURE (1130)..(1130): Absent or Asp or Arg
  MISC_FEATURE (1131)..(1131): Absent or Asp or Glu
  MISC_FEATURE (1132)..(1132): Absent or Gly or Thr
  MISC_FEATURE (1133)..(1133): Absent or Cys or Thr
  MISC_FEATURE (1134)..(1134): Absent or Lys or Asp
  MISC_FEATURE (1135)..(1135): Absent or Phe or Gly
  MISC_FEATURE (1136)..(1136): Absent or Lys or Gly
  MISC_FEATURE (1137)..(1137): Absent or Leu or Pro
  MISC_FEATURE (1138)..(1138): Absent or Thr or Ile
  MISC_FEATURE (1139)..(1139): Absent or Leu or Tyr
  MISC_FEATURE (1140)..(1140): Absent or Glu
  MISC_FEATURE (1141)..(1141): Absent or Ser or Thr
  MISC_FEATURE (1142)..(1142): Absent or Cys
  MISC_FEATURE (1143)..(1143): Absent or Ser
  MISC_FEATURE (1144)..(1144): Absent or Lys
  MISC_FEATURE (1145)..(1145): Absent or Val
  MISC_FEATURE (1146)..(1146): Absent or Leu or Ile
  MISC_FEATURE (1147)..(1147): Absent or Thr or Phe
  MISC_FEATURE (1148)..(1148): Absent or Leu or Asn
  MISC_FEATURE (1149)..(1149): Absent or Glu or Pro
  MISC_FEATURE (1150)..(1150): Absent or Leu or Asn
  MISC_FEATURE (1151)..(1151): Absent or Ile or Leu
  MISC_FEATURE (1152)..(1152): Absent or Glu or Arg
  MISC_FEATURE (1153)..(1153): Absent or Met or Phe
  MISC_FEATURE (1154)..(1154): Absent or Trp or Glu
  MISC_FEATURE (1155)..(1155): Absent or Lys or Ile
  MISC_FEATURE (1156)..(1156): Absent or Gln or Val
  MISC_FEATURE (1157)..(1157): Absent or Lys or Asp
  MISC_FEATURE (1158)..(1158): Absent or Met or Leu
  MISC_FEATURE (1159)..(1159): Absent or Lys or Arg
  MISC_FEATURE (1160)..(1160): Absent or Glu or Ser
  MISC_FEATURE (1161)..(1161): Absent or Asp or Ala
  MISC_FEATURE (1162)..(1162): Absent or Ser or Pro
  MISC_FEATURE (1163)..(1163): Absent or Ile
  MISC_FEATURE (1164)..(1164): Absent or Pro
  MISC_FEATURE (1165)..(1165): Absent or Ala
  MISC_FEATURE (1166)..(1166): Absent or Ala
  MISC_FEATURE (1167)..(1167): Absent or Glu
  MISC_FEATURE (1168)..(1168): Absent or Arg
  MISC_FEATURE (1169)..(1169): Absent or Ile
  MISC_FEATURE (1170)..(1170): Absent or Tyr
  MISC_FEATURE (1171)..(1171): Absent or Cys
  MISC_FEATURE (1172)..(1172): Absent or Pro
  MISC_FEATURE (1173)..(1173): Absent or Tyr
  MISC_FEATURE (1174)..(1174): Absent or Pro
  MISC_FEATURE (1175)..(1175): Absent or Asn
  MISC_FEATURE (1176)..(1176): Absent or Cys
  MISC_FEATURE (1177)..(1177): Absent or Ser
  MISC_FEATURE (1178)..(1178): Absent or Met
  MISC_FEATURE (1179)..(1179): Absent or Leu
  MISC_FEATURE (1180)..(1180): Absent or Met
  MISC_FEATURE (1181)..(1181): Absent or Ser
  MISC_FEATURE (1182)..(1182): Absent or Lys
  MISC_FEATURE (1183)..(1183): Absent or Thr
  MISC_FEATURE (1184)..(1184): Absent or Glu
  MISC_FEATURE (1185)..(1185): Absent or Leu
  MISC_FEATURE (1186)..(1186): Absent or Ser
  MISC_FEATURE (1187)..(1187): Absent or Ser
  MISC_FEATURE (1188)..(1188): Absent or Glu
  MISC_FEATURE (1189)..(1189): Absent or Ser
  MISC_FEATURE (1190)..(1190): Absent or Asp
  MISC_FEATURE (1191)..(1191): Absent or Leu
  MISC_FEATURE (1192)..(1192): Absent or Ser
  MISC_FEATURE (1193)..(1193): Absent or Asn
  MISC_FEATURE (1194)..(1194): Absent or Asp
  MISC_FEATURE (1195)..(1195): Absent or Arg
  MISC_FEATURE (1196)..(1196): Absent or Ser
  MISC_FEATURE (1197)..(1197): Absent or Cys
  MISC_FEATURE (1198)..(1198): Absent or Val
  MISC_FEATURE (1199)..(1199): Absent or Lys
  MISC_FEATURE (1200)..(1200): Absent or Cys
  MISC_FEATURE (1201)..(1201): Absent or Cys
  MISC_FEATURE (1202)..(1202): Absent or Gly
  MISC_FEATURE (1203)..(1203): Absent or Leu
  MISC_FEATURE (1204)..(1204): Absent or Phe
  MISC_FEATURE (1205)..(1205): Absent or Cys
  MISC_FEATURE (1206)..(1206): Absent or Ile
  MISC_FEATURE (1207)..(1207): Absent or Asp
  MISC_FEATURE (1208)..(1208): Absent or Cys
  MISC_FEATURE (1209)..(1209): Absent or Lys
  MISC_FEATURE (1210)..(1210): Absent or Val
  MISC_FEATURE (1211)..(1211): Absent or Pro
  MISC_FEATURE (1212)..(1212): Absent or Ser
  MISC_FEATURE (1213)..(1213): Absent or His
  MISC_FEATURE (1214)..(1214): Absent or Ser
  MISC_FEATURE (1215)..(1215): Absent or Asp
  MISC_FEATURE (1216)..(1216): Absent or Leu
  MISC_FEATURE (1217)..(1217): Absent or Ser
  MISC_FEATURE (1218)..(1218): Absent or Cys
  MISC_FEATURE (1219)..(1219): Absent or Ala
  MISC_FEATURE (1220)..(1220): Absent or Glu
  MISC_FEATURE (1221)..(1221): Absent or Tyr
  MISC_FEATURE (1222)..(1222): Absent or Lys
  MISC_FEATURE (1223)..(1223): Absent or Lys
  MISC_FEATURE (1224)..(1224): Absent or Leu
  MISC_FEATURE (1225)..(1225): Absent or His
  MISC_FEATURE (1226)..(1226): Absent or His
  MISC_FEATURE (1227)..(1227): Absent or Asp
  MISC_FEATURE (1228)..(1228): Absent or Pro
  MISC_FEATURE (1229)..(1229): Absent or Leu
  MISC_FEATURE (1230)..(1230): Absent or Val
  MISC_FEATURE (1231)..(1231): Absent or Asp
  MISC_FEATURE (1232)..(1232): Absent or Glu
  MISC_FEATURE (1233)..(1233): Absent or Leu
  MISC_FEATURE (1234)..(1234): Absent or Lys
  MISC_FEATURE (1235)..(1235): Absent or Leu
  MISC_FEATURE (1236)..(1236): Absent or Lys
  MISC_FEATURE (1237)..(1237): Absent or Ser
  MISC_FEATURE (1238)..(1238): Absent or Leu
  MISC_FEATURE (1239)..(1239): Absent or Ala
  MISC_FEATURE (1240)..(1240): Absent or Lys
  MISC_FEATURE (1241)..(1241): Absent or Asp
  MISC_FEATURE (1242)..(1242): Absent or Lys
  MISC_FEATURE (1243)..(1243): Absent or Lys
  MISC_FEATURE (1244)..(1244): Absent or Trp
  MISC_FEATURE (1245)..(1245): Absent or Arg
  MISC_FEATURE (1246)..(1246): Absent or Gln
  MISC_FEATURE (1247)..(1247): Absent or Cys
  MISC_FEATURE (1248)..(1248): Absent or Lys
  MISC_FEATURE (1249)..(1249): Absent or Met
  MISC_FEATURE (1250)..(1250): Absent or Cys
  MISC_FEATURE (1251)..(1251): Absent or Arg
  MISC_FEATURE (1252)..(1252): Absent or His
  MISC_FEATURE (1253)..(1253): Absent or Met
  MISC_FEATURE (1254)..(1254): Absent or Ile
  MISC_FEATURE (1255)..(1255): Absent or Glu
  MISC_FEATURE (1256)..(1256): Absent or Leu
  MISC_FEATURE (1257)..(1257): Absent or Ser
  MISC_FEATURE (1258)..(1258): Absent or His
  MISC_FEATURE (1259)..(1259): Absent or Ala
  MISC_FEATURE (1260)..(1260): Absent or Cys
  MISC_FEATURE (1261)..(1261): Absent or Asn
  MISC_FEATURE (1262)..(1262): Absent or His
  MISC_FEATURE (1263)..(1263): Absent or Met
  MISC_FEATURE (1264)..(1264): Absent or Thr
  MISC_FEATURE (1265)..(1265): Absent or Cys
  MISC_FEATURE (1266)..(1266): Absent or Arg
  MISC_FEATURE (1267)..(1267): Absent or Cys
  MISC_FEATURE (1268)..(1268): Absent or Gly
  MISC_FEATURE (1269)..(1269): Absent or Tyr
  MISC_FEATURE (1270)..(1270): Absent or Gln
  MISC_FEATURE (1271)..(1271): Absent or Phe
  MISC_FEATURE (1272)..(1272): Absent or Cys
  MISC_FEATURE (1273)..(1273): Absent or Tyr
  MISC_FEATURE (1274)..(1274): Absent or Gln
  MISC_FEATURE (1275)..(1275): Absent or Cys
  MISC_FEATURE (1276)..(1276): Absent or Glu
  MISC_FEATURE (1277)..(1277): Absent or Val
  MISC_FEATURE (1278)..(1278): Absent or Glu
  MISC_FEATURE (1279)..(1279): Absent or Trp
  MISC_FEATURE (1280)..(1280): Absent or Lys
  MISC_FEATURE (1281)..(1281): Absent or Asn
  MISC_FEATURE (1282)..(1282): Absent or Asp
  MISC_FEATURE (1283)..(1283): Absent or Gln
  MISC_FEATURE (1284)..(1284): Absent or Lys
  MISC_FEATURE (1285)..(1285): Absent or Thr
  MISC_FEATURE (1286)..(1286): Absent or Cys
  MISC_FEATURE (1287)..(1287): Absent or Ser
  MISC_FEATURE (1288)..(1288): Absent or Ser
  MISC_FEATURE (1289)..(1289): Absent or Gly
  MISC_FEATURE (1290)..(1290): Absent or Cys
  MISC_FEATURE (1291)..(1291): Absent or Leu
  MISC_FEATURE (1292)..(1292): Absent or Leu
  MISC_FEATURE (1293)..(1293): Absent or Thr
  MISC_FEATURE (1294)..(1294): Absent or Gly
  MISC_FEATURE (1295)..(1295): Absent or His
  MISC_FEATURE (1296)..(1296): Absent or Gly
  MISC_FEATURE (1297)..(1297): Absent or Tyr
  MISC_FEATURE (1298)..(1298): Absent or Tyr
  MISC_FEATURE (1299)..(1299): Absent or Asp
  MISC_FEATURE (1300)..(1300): Absent or Asp
  MISC_FEATURE (1301)..(1301): Absent or Tyr
  MISC_FEATURE (1302)..(1302): Absent or Asp
  MISC_FEATURE (1303)..(1303): Absent or Tyr
  MISC_FEATURE (1304)..(1304): Absent or Asn
  MISC_FEATURE (1305)..(1305): Absent or Glu
  MISC_FEATURE (1306)..(1306): Absent or Pro
  MISC_FEATURE (1307)..(1307): Absent or Glu
  MISC_FEATURE (1308)..(1308): Absent or Tyr
  MISC_FEATURE (1309)..(1309): Absent or Asp
  MISC_FEATURE (1310)..(1310): Absent or Phe
  MISC_FEATURE (1311)..(1311): Absent or Glu
  MISC_FEATURE (1312)..(1312): Absent or Val
  MISC_FEATURE (1313)..(1313): Absent or Asp
  MISC_FEATURE (1314)..(1314): Absent or Thr
  MISC_FEATURE (1315)..(1315): Absent or Cys
  MISC_FEATURE (1316)..(1316): Absent or Asn
  MISC_FEATURE (1317)..(1317): Absent or Tyr
  MISC_FEATURE (1318)..(1318): Absent or Tyr
  MISC_FEATURE (1319)..(1319): Absent or Ser
  MISC_FEATURE (1320)..(1320): Absent or Asp
  MISC_FEATURE (1321)..(1321): Absent or Glu
  MISC_FEATURE (1322)..(1322): Absent or Glu
  MISC_FEATURE (1323)..(1323): Absent or Gly
  MISC_FEATURE (1324)..(1324): Absent or Arg
  MISC_FEATURE (1325)..(1325): Absent or Arg
  MISC_FEATURE (1326)..(1326): Absent or Trp
  MISC_FEATURE (1327)..(1327): Absent or Pro
  MISC_FEATURE (1328)..(1328): Absent or Ser
  MISC_FEATURE (1329)..(1329): Absent or Tyr
  MISC_FEATURE (1330)..(1330): Absent or Glu
  MISC_FEATURE (1331)..(1331): Absent or Glu
  MISC_FEATURE (1332)..(1332): Absent or Tyr
  MISC_FEATURE (1333)..(1333): Absent or Ile
  MISC_FEATURE (1334)..(1334): Absent or Asp
  MISC_FEATURE (1335)..(1335): Absent or Gln
  MISC_FEATURE (1336)..(1336): Absent or Gln
  MISC_FEATURE (1337)..(1337): Absent or Met
  MISC_FEATURE (1338)..(1338): Absent or Ala
  MISC_FEATURE (1339)..(1339): Absent or Asn
  MISC_FEATURE (1340)..(1340): Absent or Pro
  MISC_FEATURE (1341)..(1341): Absent or Lys
  MISC_FEATURE (1342)..(1342): Absent or Met
  MISC_FEATURE (1343)..(1343): Absent or Met
  MISC_FEATURE (1344)..(1344): Absent or Met
  MISC_FEATURE (1345)..(1345): Absent or Trp
  MISC_FEATURE (1346)..(1346): Absent or Asn
  MISC_FEATURE (1347)..(1347): Absent or Thr
  MISC_FEATURE (1348)..(1348): Absent or Glu
  MISC_FEATURE (1349)..(1349): Absent or Gln
  MISC_FEATURE (1350)..(1350): Absent or Phe
  MISC_FEATURE (1351)..(1351): Absent or Phe
  MISC_FEATURE (1352)..(1352): Absent or Ser
  MISC_FEATURE (1353)..(1353): Absent or Glu
  MISC_FEATURE (1354)..(1354): Absent or Glu
  MISC_FEATURE (1355)..(1355): Absent or Glu
  MISC_FEATURE (1356)..(1356): Absent or Asn
  MISC_FEATURE (1357)..(1357): Absent or Ala
  MISC_FEATURE (1358)..(1358): Absent or Asp
  MISC_FEATURE (1359)..(1359): Absent or Gly
  MISC_FEATURE (1360)..(1360): Absent or Asn
  MISC_FEATURE (1361)..(1361): Absent or Asp
  MISC_FEATURE (1362)..(1362): Absent or Asp
  MISC_FEATURE (1363)..(1363): Absent or Asn
  MISC_FEATURE (1364)..(1364): Absent or Trp
  MISC_FEATURE (1365)..(1365): Absent or Asp
  MISC_FEATURE (1366)..(1366): Absent or Asp
  MISC_FEATURE (1367)..(1367): Absent or Tyr
  MISC_FEATURE (1368)..(1368): Absent or Asn
  MISC_FEATURE (1369)..(1369): Absent or Asn
  MISC_FEATURE (1370)..(1370): Absent or Tyr
  MISC_FEATURE (1371)..(1371): Absent or Gly
  MISC_FEATURE (1372)..(1372): Absent or Gly
  MISC_FEATURE (1373)..(1373): Absent or Leu
  MISC_FEATURE (1374)..(1374): Absent or Thr
  MISC_FEATURE (1375)..(1375): Absent or Ala
  MISC_FEATURE (1376)..(1376): Absent or Asn
  MISC_FEATURE (1377)..(1377): Absent or Glu
  MISC_FEATURE (1378)..(1378): Absent or Gln
  MISC_FEATURE (1379)..(1379): Absent or Leu
  MISC_FEATURE (1380)..(1380): Absent or Leu
  MISC_FEATURE (1381)..(1381): Absent or Val
  MISC_FEATURE (1382)..(1382): Absent or Val
  MISC_FEATURE (1383)..(1383): Absent or Val
  MISC_FEATURE (1384)..(1384): Absent or Ala
  MISC_FEATURE (1385)..(1385): Absent or Gly
  MISC_FEATURE (1386)..(1386): Absent or Phe
  MISC_FEATURE (1387)..(1387): Absent or Ser
  MISC_FEATURE (1388)..(1388): Absent or Arg
  MISC_FEATURE (1389)..(1389): Absent or Gln
  MISC_FEATURE (1390)..(1390): Absent or Arg
  MISC_FEATURE (1391)..(1391): Absent or Gln
  MISC_FEATURE (1392)..(1392): Absent or Ala
  MISC_FEATURE (1393)..(1393): Absent or Asn
  MISC_FEATURE (1394)..(1394): Absent or Glu
  MISC_FEATURE (1395)..(1395): Absent or Gln
  MISC_FEATURE (1396)..(1396): Absent or Gly
  MISC_FEATURE (1397)..(1397): Absent or Leu
  MISC_FEATURE (1398)..(1398): Absent or Asn
  MISC_FEATURE (1399)..(1399): Absent or Ser
  MISC_FEATURE (1400)..(1400): Absent or Ile
  MISC_FEATURE (1401)..(1401): Absent or Ile
  MISC_FEATURE (1402)..(1402): Absent or Thr
  MISC_FEATURE (1403)..(1403): Absent or Gly
  MISC_FEATURE (1404)..(1404): Absent or Asp
  MISC_FEATURE (1405)..(1405): Absent or Ile
  MISC_FEATURE (1406)..(1406): Absent or Pro
  MISC_FEATURE (1407)..(1407): Absent or Asn
  MISC_FEATURE (1408)..(1408): Absent or Ser
  MISC_FEATURE (1409)..(1409): Absent or Lys
  MISC_FEATURE (1410)..(1410): Absent or Gly
  MISC_FEATURE (1411)..(1411): Absent or Glu
  MISC_FEATURE (1412)..(1412): Absent or Gly
  MISC_FEATURE (1413)..(1413): Absent or Ser
  MISC_FEATURE (1414)..(1414): Absent or Ser
  MISC_FEATURE (1415)..(1415): Absent or Pro
  MISC_FEATURE (1416)..(1416): Absent or Ala
  MISC_FEATURE (1417)..(1417): Absent or Ala
  MISC_FEATURE (1418)..(1418): Absent or Lys
  MISC_FEATURE (1419)..(1419): Absent or Phe
  MISC_FEATURE (1420)..(1420): Absent or Met
  MISC_FEATURE (1421)..(1421): Absent or Asp
  MISC_FEATURE (1422)..(1422): Absent or Asn
  MISC_FEATURE (1423)..(1423): Absent or Val
  MISC_FEATURE (1424)..(1424): Absent or Val
  MISC_FEATURE (1425)..(1425): Absent or Tyr
  MISC_FEATURE (1426)..(1426): Absent or Arg
  MISC_FEATURE (1427)..(1427): Absent or Leu
  MISC_FEATURE (1428)..(1428): Absent or Cys
  MISC_FEATURE (1429)..(1429): Absent or Phe
  MISC_FEATURE (1430)..(1430): Absent or Lys
  MISC_FEATURE (1431)..(1431): Absent or Gly
  MISC_FEATURE (1432)..(1432): Absent or Leu
  MISC_FEATURE (1433)..(1433): Absent or Val
  MISC_FEATURE (1434)..(1434): Absent or Asn
  MISC_FEATURE (1435)..(1435): Absent or Tyr
  MISC_FEATURE (1436)..(1436): Absent or Glu
  MISC_FEATURE (1437)..(1437): Absent or Ala
  MISC_FEATURE (1438)..(1438): Absent or Val
  MISC_FEATURE (1439)..(1439): Absent or Ala
  MISC_FEATURE (1440)..(1440): Absent or Asp
  MISC_FEATURE (1441)..(1441): Absent or Asp
  MISC_FEATURE (1442)..(1442): Absent or Val
  MISC_FEATURE (1443)..(1443): Absent or Glu
  MISC_FEATURE (1444)..(1444): Absent or Lys
  MISC_FEATURE (1445)..(1445): Absent or Ala
  MISC_FEATURE (1446)..(1446): Absent or Val
  MISC_FEATURE (1447)..(1447): Absent or Lys
  MISC_FEATURE (1448)..(1448): Absent or Ala
  MISC_FEATURE (1449)..(1449): Absent or Gly
  MISC_FEATURE (1450)..(1450): Absent or Phe
  MISC_FEATURE (1451)..(1451): Absent or Gly
  MISC_FEATURE (1452)..(1452): Absent or Val
  MISC_FEATURE (1453)..(1453): Absent or Ala
  MISC_FEATURE (1454)..(1454): Absent or Ile
  MISC_FEATURE (1455)..(1455): Absent or Cys
  MISC_FEATURE (1456)..(1456): Absent or Asp
  MISC_FEATURE (1457)..(1457): Absent or Glu
  MISC_FEATURE (1458)..(1458): Absent or Lys
  MISC_FEATURE (1459)..(1459): Absent or Asp
  MISC_FEATURE (1460)..(1460): Absent or Asn
  MISC_FEATURE (1461)..(1461): Absent or Leu
  MISC_FEATURE (1462)..(1462): Absent or Leu
  MISC_FEATURE (1463)..(1463): Absent or His
  MISC_FEATURE (1464)..(1464): Absent or Glu
  MISC_FEATURE (1465)..(1465): Absent or Ile
  MISC_FEATURE (1466)..(1466): Absent or Lys
  MISC_FEATURE (1467)..(1467): Absent or Glu
  MISC_FEATURE (1468)..(1468): Absent or Ser
  MISC_FEATURE (1469)..(1469): Absent or Leu
  MISC_FEATURE (1470)..(1470): Absent or Arg
  MISC_FEATURE (1471)..(1471): Absent or Asp
  MISC_FEATURE (1472)..(1472): Absent or Ile
  MISC_FEATURE (1473)..(1473): Absent or Glu
  MISC_FEATURE (1474)..(1474): Absent or Ile
  MISC_FEATURE (1475)..(1475): Absent or Ser
  MISC_FEATURE (1476)..(1476): Absent or Arg
  MISC_FEATURE (1477)..(1477): Absent or Arg
  MISC_FEATURE (1478)..(1478): Absent or Gly
  MISC_FEATURE (1479)..(1479): Absent or Val
  MISC_FEATURE (1480)..(1480): Absent or Glu
  MISC_FEATURE (1481)..(1481): Absent or Ile
  MISC_FEATURE (1482)..(1482): Absent or Met
  MISC_FEATURE (1483)..(1483): Absent or Ala
  MISC_FEATURE (1484)..(1484): Absent or Leu
  MISC_FEATURE (1485)..(1485): Absent or Val
  MISC_FEATURE (1486)..(1486): Absent or Arg
  MISC_FEATURE (1487)..(1487): Absent or Gly
  MISC_FEATURE (1488)..(1488): Absent or Leu
  MISC_FEATURE (1489)..(1489): Absent or Ser
  MISC_FEATURE (1490)..(1490): Absent or Glu
  MISC_FEATURE (1491)..(1491): Absent or Ser
  MISC_FEATURE (1492)..(1492): Absent or Phe
  MISC_FEATURE (1493)..(1493): Absent or Asp
  MISC_FEATURE (1494)..(1494): Absent or Leu
  MISC_FEATURE (1495)..(1495): Absent or Gly
  MISC_FEATURE (1496)..(1496): Absent or Met
  MISC_FEATURE (1497)..(1497): Absent or Arg
  MISC_FEATURE (1498)..(1498): Absent or Asn
  MISC_FEATURE (1499)..(1499): Absent or Val
  MISC_FEATURE (1500)..(1500): Absent or Val
  MISC_FEATURE (1501)..(1501): Absent or Ile
  MISC_FEATURE (1502)..(1502): Absent or Tyr
  MISC_FEATURE (1503)..(1503): Absent or Cys
  MISC_FEATURE (1504)..(1504): Absent or Asp
  MISC_FEATURE (1505)..(1505): Absent or Asp
  MISC_FEATURE (1506)..(1506): Absent or Asp
  MISC_FEATURE (1507)..(1507): Absent or Trp
  MISC_FEATURE (1508)..(1508): Absent or Ile
  MISC_FEATURE (1509)..(1509): Absent or Tyr
  MISC_FEATURE (1510)..(1510): Absent or Gln
  MISC_FEATURE (1511)..(1511): Absent or Ser
  MISC_FEATURE (1512)..(1512): Absent or Ile
  MISC_FEATURE (1513)..(1513): Absent or Ile
  MISC_FEATURE (1514)..(1514): Absent or Gly
  MISC_FEATURE (1515)..(1515): Absent or Arg
  MISC_FEATURE (1516)..(1516): Absent or Gly
  MISC_FEATURE (1517)..(1517): Absent or Lys
  MISC_FEATURE (1518)..(1518): Absent or Ser
  MISC_FEATURE (1519)..(1519): Absent or Lys
  MISC_FEATURE (1520)..(1520): Absent or Lys
  MISC_FEATURE (1521)..(1521): Absent or Lys
  MISC_FEATURE (1522)..(1522): Absent or Ile
  MISC_FEATURE (1523)..(1523): Absent or Asp
  MISC_FEATURE (1524)..(1524): Absent or His
  MISC_FEATURE (1525)..(1525): Absent or Leu
  MISC_FEATURE (1526)..(1526): Absent or Val
  MISC_FEATURE (1527)..(1527): Absent or Glu
  MISC_FEATURE (1528)..(1528): Absent or Glu
  MISC_FEATURE (1529)..(1529): Absent or Val
  MISC_FEATURE (1530)..(1530): Absent or Gln
  MISC_FEATURE (1531)..(1531): Absent or Gly
  MISC_FEATURE (1532)..(1532): Absent or Ile
  MISC_FEATURE (1533)..(1533): Absent or Leu
  MISC_FEATURE (1534)..(1534): Absent or Glu
  MISC_FEATURE (1535)..(1535): Absent or Lys
  MISC_FEATURE (1536)..(1536): Absent or Met
  MISC_FEATURE (1537)..(1537): Absent or Ala
  MISC_FEATURE (1538)..(1538): Absent or Cys
  MISC_FEATURE (1539)..(1539): Absent or Ile
  MISC_FEATURE (1540)..(1540): Absent or Asp
  MISC_FEATURE (1541)..(1541): Absent or Ala
  MISC_FEATURE (1542)..(1542): Absent or Val
  MISC_FEATURE (1543)..(1543): Absent or Leu
  MISC_FEATURE (1544)..(1544): Absent or Val
  MISC_FEATURE (1545)..(1545): Absent or Ala
  MISC_FEATURE (1546)..(1546): Absent or Arg
  MISC_FEATURE (1547)..(1547): Absent or Asn
  MISC_FEATURE (1548)..(1548): Absent or Asp
  MISC_FEATURE (1549)..(1549): Absent or Val
  MISC_FEATURE (1550)..(1550): Absent or Lys
  MISC_FEATURE (1551)..(1551): Absent or Phe
  MISC_FEATURE (1552)..(1552): Absent or Ala
  MISC_FEATURE (1553)..(1553): Absent or Phe
  MISC_FEATURE (1554)..(1554): Absent or Arg
  MISC_FEATURE (1555)..(1555): Absent or Leu
  MISC_FEATURE (1556)..(1556): Absent or Ala
  MISC_FEATURE (1557)..(1557): Absent or Arg
  MISC_FEATURE (1558)..(1558): Absent or Glu
  MISC_FEATURE (1559)..(1559): Absent or Ala
  MISC_FEATURE (1560)..(1560): Absent or Ile
  MISC_FEATURE (1561)..(1561): Absent or Gly
  MISC_FEATURE (1562)..(1562): Absent or Arg
  MISC_FEATURE (1563)..(1563): Absent or Asn
  MISC_FEATURE (1564)..(1564): Absent or Ser
  MISC_FEATURE (1565)..(1565): Absent or Val
  MISC_FEATURE (1566)..(1566): Absent or Asp
  MISC_FEATURE (1567)..(1567): Absent or Val
  MISC_FEATURE (1568)..(1568): Absent or Asn
  MISC_FEATURE (1569)..(1569): Absent or Ala
  MISC_FEATURE (1570)..(1570): Absent or Glu
  MISC_FEATURE (1571)..(1571): Absent or Gln
  MISC_FEATURE (1572)..(1572): Absent or Gly
  MISC_FEATURE (1573)..(1573): Absent or Glu
  MISC_FEATURE (1574)..(1574): Absent or Thr
  MISC_FEATURE (1575)..(1575): Absent or Cys
  MISC_FEATURE (1576)..(1576): Absent or Gly
  MISC_FEATURE (1577)..(1577): Absent or Ile
  MISC_FEATURE (1578)..(1578): Absent or Phe
  MISC_FEATURE (1579)..(1579): Absent or Phe
  MISC_FEATURE (1580)..(1580): Absent or Glu
  MISC_FEATURE (1581)..(1581): Absent or Glu
  MISC_FEATURE (1582)..(1582): Absent or Thr
  MISC_FEATURE (1583)..(1583): Absent or Asp
  MISC_FEATURE (1584)..(1584): Absent or Val
  MISC_FEATURE (1585)..(1585): Absent or Glu
  MISC_FEATURE (1586)..(1586): Absent or His
  MISC_FEATURE (1587)..(1587): Absent or Met
  MISC_FEATURE (1588)..(1588): Absent or Phe
  MISC_FEATURE (1589)..(1589): Absent or Val
  MISC_FEATURE (1590)..(1590): Absent or Thr
  MISC_FEATURE (1591)..(1591): Absent or Glu
  MISC_FEATURE (1592)..(1592): Absent or Lys
  MISC_FEATURE (1593)..(1593): Absent or Cys
  MISC_FEATURE (1594)..(1594): Absent or Leu
  MISC_FEATURE (1595)..(1595): Absent or His
  MISC_FEATURE (1596)..(1596): Absent or Arg
  MISC_FEATURE (1597)..(1597): Absent or His
  MISC_FEATURE (1598)..(1598): Absent or Cys
  MISC_FEATURE (1599)..(1599): Absent or Phe
  MISC_FEATURE (1600)..(1600): Absent or Pro
  MISC_FEATURE (1601)..(1601): Absent or Cys
  MISC_FEATURE (1602)..(1602): Absent or Val
  MISC_FEATURE (1603)..(1603): Absent or Lys
  MISC_FEATURE (1604)..(1604): Absent or Gln
  MISC_FEATURE (1605)..(1605): Absent or His
  MISC_FEATURE (1606)..(1606): Absent or Val
  MISC_FEATURE (1607)..(1607): Absent or Lys
  MISC_FEATURE (1608)..(1608): Absent or Val
  MISC_FEATURE (1609)..(1609): Absent or Lys
  MISC_FEATURE (1610)..(1610): Absent or Leu
  MISC_FEATURE (1611)..(1611): Absent or Arg
  MISC_FEATURE (1612)..(1612): Absent or Ser
  MISC_FEATURE (1613)..(1613): Absent or Gly
  MISC_FEATURE (1614)..(1614): Absent or Thr
  MISC_FEATURE (1615)..(1615): Absent or Glu
  MISC_FEATURE (1616)..(1616): Absent or Pro
  MISC_FEATURE (1617)..(1617): Absent or Thr
  MISC_FEATURE (1618)..(1618): Absent or Cys
  MISC_FEATURE (1619)..(1619): Absent or Leu
  MISC_FEATURE (1620)..(1620): Absent or Glu
  MISC_FEATURE (1621)..(1621): Absent or Tyr
  MISC_FEATURE (1622)..(1622): Absent or Gly
  MISC_FEATURE (1623)..(1623): Absent or Cys
  MISC_FEATURE (1624)..(1624): Absent or Lys
  MISC_FEATURE (1625)..(1625): Absent or Phe
  MISC_FEATURE (1626)..(1626): Absent or Lys
  MISC_FEATURE (1627)..(1627): Absent or Leu
  MISC_FEATURE (1628)..(1628): Absent or Thr
  MISC_FEATURE (1629)..(1629): Absent or Leu
  MISC_FEATURE (1630)..(1630): Absent or Glu
  MISC_FEATURE (1631)..(1631): Absent or Arg
  MISC_FEATURE (1632)..(1632): Absent or Cys
  MISC_FEATURE (1633)..(1633): Absent or Ser
  MISC_FEATURE (1634)..(1634): Absent or Lys
  MISC_FEATURE (1635)..(1635): Absent or Val
  MISC_FEATURE (1636)..(1636): Absent or Leu
  MISC_FEATURE (1637)..(1637): Absent or Thr
  MISC_FEATURE (1638)..(1638): Absent or Leu
  MISC_FEATURE (1639)..(1639): Absent or Lys
  MISC_FEATURE (1640)..(1640): Absent or Leu
  MISC_FEATURE (1641)..(1641): Absent or Ile
  MISC_FEATURE (1642)..(1642): Absent or Glu
  MISC_FEATURE (1643)..(1643): Absent or Met
  MISC_FEATURE (1644)..(1644): Absent or Trp
  MISC_FEATURE (1645)..(1645): Absent or Lys
  MISC_FEATURE (1646)..(1646): Absent or Gln
  MISC_FEATURE (1647)..(1647): Absent or Lys
  MISC_FEATURE (1648)..(1648): Absent or Met
  MISC_FEATURE (1649)..(1649): Absent or Lys
  MISC_FEATURE (1650)..(1650): Absent or Glu
  MISC_FEATURE (1651)..(1651): Absent or Asp
  MISC_FEATURE (1652)..(1652): Absent or Ser
  MISC_FEATURE (1653)..(1653): Absent or Ile
  MISC_FEATURE (1654)..(1654): Absent or Pro
  MISC_FEATURE (1655)..(1655): Absent or Ala
  MISC_FEATURE (1656)..(1656): Absent or Ala
  MISC_FEATURE (1657)..(1657): Absent or Glu
  MISC_FEATURE (1658)..(1658): Absent or Arg
  MISC_FEATURE (1659)..(1659): Absent or Ile
  MISC_FEATURE (1660)..(1660): Absent or Tyr
  MISC_FEATURE (1661)..(1661): Absent or Cys
  MISC_FEATURE (1662)..(1662): Absent or Pro
  MISC_FEATURE (1663)..(1663): Absent or Tyr
  MISC_FEATURE (1664)..(1664): Absent or Pro
  MISC_FEATURE (1665)..(1665): Absent or Asn
  MISC_FEATURE (1666)..(1666): Absent or Cys
  MISC_FEATURE (1667)..(1667): Absent or Ser
  MISC_FEATURE (1668)..(1668): Absent or Met
  MISC_FEATURE (1669)..(1669): Absent or Leu
  MISC_FEATURE (1670)..(1670): Absent or Met
  MISC_FEATURE (1671)..(1671): Absent or Ser
  MISC_FEATURE (1672)..(1672): Absent or Lys
  MISC_FEATURE (1673)..(1673): Absent or Thr
  MISC_FEATURE (1674)..(1674): Absent or Glu
  MISC_FEATURE (1675)..(1675): Absent or Leu
  MISC_FEATURE (1676)..(1676): Absent or Ser
  MISC_FEATURE (1677)..(1677): Absent or Ser
  MISC_FEATURE (1678)..(1678): Absent or Glu
  MISC_FEATURE (1679)..(1679): Absent or Ala
  MISC_FEATURE (1680)..(1680): Absent or Asp
  MISC_FEATURE (1681)..(1681): Absent or Leu
  MISC_FEATURE (1682)..(1682): Absent or Ser
  MISC_FEATURE (1683)..(1683): Absent or Asn
  MISC_FEATURE (1684)..(1684): Absent or Val
  MISC_FEATURE (1685)..(1685): Absent or Arg
  MISC_FEATURE (1686)..(1686): Absent or Thr
  MISC_FEATURE (1687)..(1687): Absent or Cys
  MISC_FEATURE (1688)..(1688): Absent or Val
  MISC_FEATURE (1689)..(1689): Absent or Lys
  MISC_FEATURE (1690)..(1690): Absent or Cys
  MISC_FEATURE (1691)..(1691): Absent or Cys
  MISC_FEATURE (1692)..(1692): Absent or Gly
  MISC_FEATURE (1693)..(1693): Absent or Leu
  MISC_FEATURE (1694)..(1694): Absent or Phe
  MISC_FEATURE (1695)..(1695): Absent or Cys
  MISC_FEATURE (1696)..(1696): Absent or Ile
  MISC_FEATURE (1697)..(1697): Absent or Asp
  MISC_FEATURE (1698)..(1698): Absent or Cys
  MISC_FEATURE (1699)..(1699): Absent or Lys
  MISC_FEATURE (1700)..(1700): Absent or Val
  MISC_FEATURE (1701)..(1701): Absent or Pro
  MISC_FEATURE (1702)..(1702): Absent or Ser
  MISC_FEATURE (1703)..(1703): Absent or His
  MISC_FEATURE (1704)..(1704): Absent or Thr
  MISC_FEATURE (1705)..(1705): Absent or Asp
  MISC_FEATURE (1706)..(1706): Absent or Leu
  MISC_FEATURE (1707)..(1707): Absent or Ser
  MISC_FEATURE (1708)..(1708): Absent or Tyr
  MISC_FEATURE (1709)..(1709): Absent or Asp
  MISC_FEATURE (1710)..(1710): Absent or Asp
  MISC_FEATURE (1711)..(1711): Absent or Tyr
  MISC_FEATURE (1712)..(1712): Absent or Lys
  MISC_FEATURE (1713)..(1713): Absent or Lys
  MISC_FEATURE (1714)..(1714): Absent or Leu
  MISC_FEATURE (1715)..(1715): Absent or His
  MISC_FEATURE (1716)..(1716): Absent or Pro
  MISC_FEATURE (1717)..(1717): Absent or Asp
  MISC_FEATURE (1718)..(1718): Absent or Pro
  MISC_FEATURE (1719)..(1719): Absent or Leu
  MISC_FEATURE (1720)..(1720): Absent or Val
  MISC_FEATURE (1721)..(1721): Absent or Asp
  MISC_FEATURE (1722)..(1722): Absent or Asp
  MISC_FEATURE (1723)..(1723): Absent or Leu
  MISC_FEATURE (1724)..(1724): Absent or Lys
  MISC_FEATURE (1725)..(1725): Absent or Leu
  MISC_FEATURE (1726)..(1726): Absent or Lys
  MISC_FEATURE (1727)..(1727): Absent or Ser
  MISC_FEATURE (1728)..(1728): Absent or Leu
  MISC_FEATURE (1729)..(1729): Absent or Ala
  MISC_FEATURE (1730)..(1730): Absent or Asn
  MISC_FEATURE (1731)..(1731): Absent or Asp
  MISC_FEATURE (1732)..(1732): Absent or Lys
  MISC_FEATURE (1733)..(1733): Absent or Met
  MISC_FEATURE (1734)..(1734): Absent or Trp
  MISC_FEATURE (1735)..(1735): Absent or Arg
  MISC_FEATURE (1736)..(1736): Absent or Gln
  MISC_FEATURE (1737)..(1737): Absent or Cys
  MISC_FEATURE (1738)..(1738): Absent or Val
  MISC_FEATURE (1739)..(1739): Absent or Lys
  MISC_FEATURE (1740)..(1740): Absent or Cys
  MISC_FEATURE (1741)..(1741): Absent or Arg
  MISC_FEATURE (1742)..(1742): Absent or His
  MISC_FEATURE (1743)..(1743): Absent or Met
  MISC_FEATURE (1744)..(1744): Absent or Ile
  MISC_FEATURE (1745)..(1745): Absent or Glu
  MISC_FEATURE (1746)..(1746): Absent or Leu
  MISC_FEATURE (1747)..(1747): Absent or Ser
  MISC_FEATURE (1748)..(1748): Absent or His
  MISC_FEATURE (1749)..(1749): Absent or Gly
  MISC_FEATURE (1750)..(1750): Absent or Cys
  MISC_FEATURE (1751)..(1751): Absent or Asn
  MISC_FEATURE (1752)..(1752): Absent or His
  MISC_FEATURE (1753)..(1753): Absent or Met
  MISC_FEATURE (1754)..(1754): Absent or Thr
  MISC_FEATURE (1755)..(1755): Absent or Cys
  MISC_FEATURE (1756)..(1756): Absent or Arg
  MISC_FEATURE (1757)..(1757): Absent or Cys
  MISC_FEATURE (1758)..(1758): Absent or Gly
  MISC_FEATURE (1759)..(1759): Absent or Tyr
  MISC_FEATURE (1760)..(1760): Absent or Glu
  MISC_FEATURE (1761)..(1761): Absent or Phe
  MISC_FEATURE (1762)..(1762): Absent or Cys
  MISC_FEATURE (1763)..(1763): Absent or Tyr
  MISC_FEATURE (1764)..(1764): Absent or Glu
  MISC_FEATURE (1765)..(1765): Absent or Cys
  MISC_FEATURE (1766)..(1766): Absent or Gly
  MISC_FEATURE (1767)..(1767): Absent or Ile
  MISC_FEATURE (1768)..(1768): Absent or Glu
  MISC_FEATURE (1769)..(1769): Absent or Trp
  MISC_FEATURE (1770)..(1770): Absent or Gln
  MISC_FEATURE (1771)..(1771): Absent or Lys
  MISC_FEATURE (1772)..(1772): Absent or Arg
  MISC_FEATURE (1773)..(1773): Absent or Asp
  MISC_FEATURE (1774)..(1774): Absent or Lys
  MISC_FEATURE (1775)..(1775): Absent or Val
  MISC_FEATURE (1776)..(1776): Absent or Ile
  MISC_FEATURE (1777)..(1777): Absent or Met
  MISC_FEATURE (1778)..(1778): Absent or Met
  MISC_FEATURE (1779)..(1779): Absent or Met
  MISC_FEATURE (1780)..(1780): Absent or Lys
  MISC_FEATURE (1781)..(1781): Absent or Ile
  MISC_FEATURE (1782)..(1782): Absent or Ala
  MISC_FEATURE (1783)..(1783): Absent or Met
  MISC_FEATURE (1784)..(1784): Absent or Met
  MISC_FEATURE (1785)..(1785): Absent or Thr
  MISC_FEATURE (1786)..(1786): Absent or Thr
  MISC_FEATURE (1787)..(1787): Absent or Gln
  MISC_FEATURE (1788)..(1788): Absent or Asn
  MISC_FEATURE (1789)..(1789): Absent or Met
  MISC_FEATURE (1790)..(1790): Absent or Ile
  MISC_FEATURE (1791)..(1791): Absent or Val
  MISC_FEATURE (1792)..(1792): Absent or Lys
  MISC_FEATURE (1793)..(1793): Absent or Arg
  MISC_FEATURE (1794)..(1794): Absent or Ile
  MISC_FEATURE (1795)..(1795): Absent or Cys
  MISC_FEATURE (1796)..(1796): Absent or Ala
  MISC_FEATURE (1797)..(1797): Absent or Ser
  MISC_FEATURE (1798)..(1798): Absent or Ala
  MISC_FEATURE (1799)..(1799): Absent or Ile
  MISC_FEATURE (1800)..(1800): Absent or Met
  MISC_FEATURE (1801)..(1801): Absent or Met
  MISC_FEATURE (1802)..(1802): Absent or Lys
  MISC_FEATURE (1803)..(1803): Absent or Met
  MISC_FEATURE (1804)..(1804): Absent or Val
  MISC_FEATURE (1805)..(1805): Absent or Val
  MISC_FEATURE (1806)..(1806): Absent or Val
  MISC_FEATURE (1807)..(1807): Absent or Gly
  MISC_FEATURE (1808)..(1808): Absent or Met
  MISC_FEATURE (1809)..(1809): Absent or Ile
  MISC_FEATURE (1810)..(1810): Absent or Leu
  MISC_FEATURE (1811)..(1811): Absent or Lys
  MISC_FEATURE (1812)..(1812): Absent or Ile
  MISC_FEATURE (1813)..(1813): Absent or Phe
  MISC_FEATURE (1814)..(1814): Absent or Tyr
  MISC_FEATURE (1815)..(1815): Absent or Asp
  MISC_FEATURE (1816)..(1816): Absent or Ala
  MISC_FEATURE (1817)..(1817): Absent or Pro
  MISC_FEATURE (1818)..(1818): Absent or Arg
  MISC_FEATURE (1819)..(1819): Absent or Asp
  MISC_FEATURE (1820)..(1820): Absent or Asp
  MISC_FEATURE (1821)..(1821): Absent or Gln
  MISC_FEATURE (1822)..(1822): Absent or Asp
  MISC_FEATURE (1823)..(1823): Absent or Val
  MISC_FEATURE (1824)..(1824): Absent or Val
  MISC_FEATURE (1825)..(1825): Absent or Tyr
  MISC_FEATURE (1826)..(1826): Absent or Lys
  MISC_FEATURE (1827)..(1827): Absent or Tyr
  MISC_FEATURE (1828)..(1828): Absent or Pro
  MISC_FEATURE (1829)..(1829): Absent or Ser
  MISC_FEATURE (1830)..(1830): Absent or Pro
  MISC_FEATURE (1831)..(1831): Absent or Glu
  MISC_FEATURE (1832)..(1832): Absent or Gln
  MISC_FEATURE (1833)..(1833): Absent or Phe
  MISC_FEATURE (1834)..(1834): Absent or Phe
  MISC_FEATURE (1835)..(1835): Absent or Ser
  MISC_FEATURE (1836)..(1836): Absent or Glu
  MISC_FEATURE (1837)..(1837): Absent or Glu
  MISC_FEATURE (1838)..(1838): Absent or Arg
  MISC_FEATURE (1839)..(1839): Absent or Asn
  MISC_FEATURE (1840)..(1840): Absent or Ala
  MISC_FEATURE (1841)..(1841): Absent or Asp
  MISC_FEATURE (1842)..(1842): Absent or Gly
  MISC_FEATURE (1843)..(1843): Absent or Asp
  MISC_FEATURE (1844)..(1844): Absent or Asp
  MISC_FEATURE (1845)..(1845): Absent or Tyr
  MISC_FEATURE (1846)..(1846): Absent or Ile
  MISC_FEATURE (1847)..(1847): Absent or Trp
  MISC_FEATURE (1848)..(1848): Absent or Asp
  MISC_FEATURE (1849)..(1849): Absent or Asp
  MISC_FEATURE (1850)..(1850): Absent or Tyr
  MISC_FEATURE (1851)..(1851): Absent or Asn
  MISC_FEATURE (1852)..(1852): Absent or Asn
  MISC_FEATURE (1853)..(1853): Absent or Tyr
  MISC_FEATURE (1854)..(1854): Absent or Gly
  MISC_FEATURE (1855)..(1855): Absent or Gly
  MISC_FEATURE (1856)..(1856): Absent or Leu
  MISC_FEATURE (1857)..(1857): Absent or Thr
  MISC_FEATURE (1858)..(1858): Absent or Gly
  MISC_FEATURE (1859)..(1859): Absent or Asp
  MISC_FEATURE (1860)..(1860): Absent or Lys
  MISC_FEATURE (1861)..(1861): Absent or Gly
  MISC_FEATURE (1862)..(1862): Absent or Gly
  MISC_FEATURE (1863)..(1863): Absent or Phe
  MISC_FEATURE (1864)..(1864): Absent or Asp
  MISC_FEATURE (1865)..(1865): Absent or Glu
  MISC_FEATURE (1866)..(1866): Absent or Gly
  MISC_FEATURE (1867)..(1867): Absent or Phe
  MISC_FEATURE (1868)..(1868): Absent or Phe
  MISC_FEATURE (1869)..(1869): Absent or Arg
  MISC_FEATURE (1870)..(1870): Absent or Asp
  MISC_FEATURE (1871)..(1871): Absent or Tyr
  MISC_FEATURE (1872)..(1872): Absent or Tyr
  MISC_FEATURE (1873)..(1873): Absent or Ser
  MISC_FEATURE (1874)..(1874): Absent or Leu
XXXXXXXXXXXXXXXXXXXXXXXXXXXXXXXXXXXXXXXXXXXXXXXXXXXXXXXXXXXXXXXXXXXXXXXXXXXXXXXXXXXXXXXXXXXXXXXXXXXXXXXXXXXXXXXXXXXXXXXXXXXXXXXXXXXXXXXXXXXXXXXXXXXXXXXXXXXXXXXXXXXXXXXXXXXXXXXXXXXXXXXXXXXXXXXXXXXXXXXXXXXXXXXXXXXXXXXXXXXXXXXXXXXXXXXXXXXXXXXXXXXXXXXXXXXXXXXXXXXXXXXXXXXXXXXXXXXXXXXXXXXXXXXXXXXXXXXXXXXXXXXXXXXXXXXXPXXXXXXXXXPXXXXXXXXXXXXXXXXXXXXXXXXXXXXXXXXXXXXXXXXXXXXXXXXXXXXXXXXXXXXLXXXXXXXXXXXXXXXXXXXXXXXXXXXXXXXXXXXXXXXXXXXXXGXXXXXXXXXXXXXXXXXXXXXXXXXXXXXXXXXXXXXXXXXXXXXXXXXXXXXXXXXXXXXXXXXXXXXXXXXXXXXXXXXXXXXXXXXXXXXXXXXXXXXXXXXXXXXXXXXXXXXXXXXXXXXXXXXSXKRXXXXXXXXXXXXXXXYXPXXXDXVXGXXXXXXXDXXXXXXXXXXXXAXLPXLAFEGXXRXNXPXXXXXXXXXXXXXXXXXXXXXXXXXXXXXXXXXXXXXXXXXXXXXXXXXXXXXXXXXXXXXGXLXYARVXXAXXXXXXXXELXCXDXXXXXXXXXXFGXLXXXXXXXXXXXXXXXXXXXGXXFXXSXGXXRXLLXXXXXXXXXXXXXXXXXXXXXLGXXXXXXXXFEXAXGXNGXXWVXXXXXXXXXXXXXXXXXXXXXXXXXXXXXXXXXXXXXXXXXXXXXXXXXXXXXXXXXXXXXXXXXXXXXXXXXXXXXXXXXXXXXXXXXXXXXXXXXXXXXXXXXXXXXXXXXXXXXXXXXXXXXXXXXXXXXXXXXXXXXXXXXXXXXXXXXXXXXXXXXXXXXXXXXXXXXXXXXXXXXXXXXXXXXXXXXXXXXXXXXXXXXXXXXXXXXXXXXXXXXXXXXXXXXXXXXXXXXXXXXXXXXXXXXXXXXXXXXXXXXXXXXXXXXXXXXXXXXXXXXXXXXXXXXXXXXXXXXXXXXXXXXXXXXXXXXXXXXXXXXXXXXXXXXXXXXXXXXXXXXXXXXXXXXXXXXXXXXXXXXXXXXXXXXXXXXXXXXXXXXXXXXXXXXXXXXXXXXXXXXXXXXXXXXXXXXXXXXXXXXXXXXXXXXXXXXXXXXXXXXXXXXXXXXXXXXXXXXXXXXXXXXXXXXXXXXXXXXXXXXXXXXXXXXXXXXXXXXXXXXXXXXXXXXXXXXXXXXXXXXXXXXXXXXXXXXXXXXXXXXXXXXXXXXXXXXXXXXXXXXXXXXXXXXXXXXXXXXXXXXXXXXXXXXXXXXXXXXXXXXXXXXXXXXXXXXXXXXXXXXXXXXXXXXXXXXXXXXXXXXXXXXXXXXXXXXXXXXXXXXXXXXXXXXXXXXXXXXXXXXXXXXXXXXXXXXXXXXXXXXXXXXXXXXXXXXXXXXXXXXXXXXXXXXXXXXXXXXXXXXXXXXXXXXXXXXXXXXXXXXXXXXXXXXXXXXXXXXXXXXXXXXXXXXXXXXXXXXXXXXXXXXXXXXXXXXXXXXXXXXXXXXXXXXXXXXXXXXXXXXXXXXXXXXXXXXXXXXXXXXXXXXXXXXXXXXXXXXXXXXXXXXXXXXXXXXXXXXXXXXXXXXXXXXXXXXXXXXXXXXXXXXXXXXXXXXXXXXXXXXXXXXXXXXXXXXXXXXXXXXXXXXXXXXXXXXXXXXXXXXXXXXXXXXXXXXXXXXXXXXXXXXXXXXXXXXXXXXXXXXXXXXXXXXXXXXXXXXXXXXXXXXXXXXXXXXXXXXXXXXXXXXXXXXX

SEQ ID NO: 17395 - protein, 160 aa, Artificial
  Consensus of seq id no, 208 and its homologs
  MISC_FEATURE (1)..(1): Absent or Pro
  MISC_FEATURE (2)..(2): Absent or Ala
  MISC_FEATURE (3)..(3): Absent or Gly
  MISC_FEATURE (4)..(4): Absent or Thr
  MISC_FEATURE (5)..(5): Absent or Cys
  MISC_FEATURE (6)..(6): Absent or Pro
  MISC_FEATURE (7)..(7): Absent or Trp
  MISC_FEATURE (8)..(8): Absent or Leu
  MISC_FEATURE (9)..(9): Absent or Pro
  MISC_FEATURE (10)..(10): Absent or Ala
  MISC_FEATURE (11)..(11): Absent or Pro
  MISC_FEATURE (12)..(12): Absent or Gly
  MISC_FEATURE (13)..(13): Absent or Pro
  MISC_FEATURE (14)..(14): Absent or Gly
  MISC_FEATURE (15)..(15): Absent or Arg
  MISC_FEATURE (16)..(16): Ser or Absent
  MISC_FEATURE (17)..(17): Arg or Absent
  MISC_FEATURE (18)..(18): Absent or Ser
  MISC_FEATURE (19)..(19): Absent or Ser
  MISC_FEATURE (20)..(20): Absent or Cys
  MISC_FEATURE (21)..(21): Absent or Thr
  MISC_FEATURE (22)..(22): Absent or Arg
  MISC_FEATURE (23)..(23): Absent or Arg
  MISC_FEATURE (24)..(24): Absent or Arg
  MISC_FEATURE (25)..(25): Absent or Ala
  MISC_FEATURE (26)..(26): Absent or Arg
  MISC_FEATURE (27)..(27): Absent or Pro
  MISC_FEATURE (28)..(28): Absent or Gly or Leu
  MISC_FEATURE (29)..(29): Trp or Arg or Absent or Met
  MISC_FEATURE (30)..(30): Arg or Absent or Val
  MISC_FEATURE (31)..(31): Arg or Absent or His
  MISC_FEATURE (32)..(32): Arg or Ser or Absent or Lys
  MISC_FEATURE (33)..(33): Gly or Ser or Absent or Phe
  MISC_FEATURE (34)..(34): Trp or Ser or Absent or Ala
  MISC_FEATURE (35)..(35): Thr or Ser or Absent
  MISC_FEATURE (36)..(36): Ala or Pro or Absent
  MISC_FEATURE (37)..(37): Thr or Absent or Ala
  MISC_FEATURE (38)..(38): Arg or Absent or Ala
  MISC_FEATURE (39)..(39): Cys or Absent or Gly
  MISC_FEATURE (40)..(40): Trp or Pro or Absent or Phe
  MISC_FEATURE (42)..(42): Arg or Ala or Thr
  MISC_FEATURE (43)..(43): Arg or Pro or Gly
  MISC_FEATURE (44)..(44): Cys or Thr or Arg or Absent
  MISC_FEATURE (45)..(45): Ser or Gly or Asn
  MISC_FEATURE (46)..(46): Absent or Thr or Arg or Ala
  MISC_FEATURE (47)..(47): Absent or Pro or Ala
  MISC_FEATURE (48)..(48): Absent or Asp or Ser
  MISC_FEATURE (49)..(49): Trp or Pro or Ala
  MISC_FEATURE (51)..(51): Arg or Trp or Thr
  MISC_FEATURE (53)..(53): Absent or Gly
  MISC_FEATURE (54)..(54): Cys or Ser or Absent
  MISC_FEATURE (55)..(55): Arg or Trp or Pro or Thr
  MISC_FEATURE (88)..(88): Phe or Leu
  MISC_FEATURE (89)..(89): Gly or Absent
  MISC_FEATURE (90)..(90): Ile or Absent
  MISC_FEATURE (91)..(91): Val or Absent
  MISC_FEATURE (92)..(92): Thr or Absent
  MISC_FEATURE (93)..(93): Lys or Absent
  MISC_FEATURE (94)..(94): Asn or Ser or Absent
  MISC_FEATURE (95)..(95): Ile or Leu or Absent
  MISC_FEATURE (96)..(96): Asp or Absent
  MISC_FEATURE (97)..(97): Val or Absent
  MISC_FEATURE (99)..(99): Asn or Ala
  MISC_FEATURE (100)..(100): Thr or Arg or Ser
  MISC_FEATURE (101)..(101): Val or Glu or Absent
  MISC_FEATURE (102)..(102): Ser or Val or Trp
  MISC_FEATURE (104)..(104): Ser or Leu
  MISC_FEATURE (105)..(105): Ile or Val or Ala or Leu
  MISC_FEATURE (107)..(107): Ala or Ser
  MISC_FEATURE (108)..(108): Gly or Pro or Leu
  MISC_FEATURE (109)..(109): Ala or Thr or Phe
  MISC_FEATURE (110)..(110): Ile or Val or Absent
  MISC_FEATURE (111)..(111): Trp or Absent
  MISC_FEATURE (112)..(112): Ile or Val or Absent
  MISC_FEATURE (113)..(113): Asn or Absent
  MISC_FEATURE (114)..(114): Cys or Absent
  MISC_FEATURE (115)..(115): Tyr or Absent
  MISC_FEATURE (116)..(116): Phe or Absent
  MISC_FEATURE (117)..(117): Ala or Absent
  MISC_FEATURE (118)..(118): Phe or Absent
  MISC_FEATURE (119)..(119): Asp or Absent
  MISC_FEATURE (120)..(120): Pro or Absent
  MISC_FEATURE (121)..(121): Asp or Absent
  MISC_FEATURE (122)..(122): Ala or Absent
  MISC_FEATURE (123)..(123): Pro or Absent
  MISC_FEATURE (124)..(124): Phe or Absent
  MISC_FEATURE (125)..(125): Gly or Absent
  MISC_FEATURE (126)..(126): Gly or Absent
  MISC_FEATURE (127)..(127): Tyr or Absent
  MISC_FEATURE (128)..(128): Lys or Absent
  MISC_FEATURE (129)..(129): Met or Absent
  MISC_FEATURE (130)..(130): Ser or Absent
  MISC_FEATURE (131)..(131): Gly or Absent
  MISC_FEATURE (132)..(132): Phe or Absent
  MISC_FEATURE (133)..(133): Gly or Absent
  MISC_FEATURE (134)..(134): Lys or Arg or Absent
  MISC_FEATURE (135)..(135): Asp or Absent
  MISC_FEATURE (136)..(136): Met or Gln or Absent
  MISC_FEATURE (137)..(137): Gly or Absent
  MISC_FEATURE (138)..(138): Met or Leu or Absent
  MISC_FEATURE (139)..(139): Asp or Ala or Absent
  MISC_FEATURE (140)..(140): Ala or Absent
  MISC_FEATURE (141)..(141): Leu or Met or Absent
  MISC_FEATURE (142)..(142): Asp or Absent
  MISC_FEATURE (143)..(143): Lys or Absent
  MISC_FEATURE (144)..(144): Tyr or Absent
  MISC_FEATURE (145)..(145): Leu or Absent
  MISC_FEATURE (146)..(146): Gln or Absent
  MISC_FEATURE (147)..(147): Thr or Val or Absent
  MISC_FEATURE (148)..(148): Lys or Absent
  MISC_FEATURE (149)..(149): Thr or Ser or Absent
  MISC_FEATURE (150)..(150): Val or Absent
  MISC_FEATURE (151)..(151): Val or Ile or Absent
  MISC_FEATURE (152)..(152): Thr or Absent
  MISC_FEATURE (153)..(153): Pro or Ala or Absent
  MISC_FEATURE (154)..(154): Leu or Absent
  MISC_FEATURE (155)..(155): Tyr or Pro or Absent
  MISC_FEATURE (156)..(156): Asn or Asp or Absent
  MISC_FEATURE (157)..(157): Thr or Ser or Absent
  MISC_FEATURE (158)..(158): Pro or Absent
  MISC_FEATURE (159)..(159): Trp or Absent
  MISC_FEATURE (160)..(160): Leu or Tyr or Absent
XXXXXXXXXXXXXXXXXXXXXXXXXXXXXXXXXXXXXXXXRXXXXXXXXRXPXXXLLQAAATVTLTITIKNTNNFKFHITALTRSQYXXXXXXXXXXAXXXXRXXRXXXXXXXXXXXXXXXXXXXXXXXXXXXXXXXXXXXXXXXXXXXXXXXXXXXXXX

SEQ ID NO: 17396 - protein, 535 aa, Artificial
  Consensus of seq id no. 215 and its homologs
  MISC_FEATURE (1)..(1): Arg or Absent
  MISC_FEATURE (2)..(2): Thr or Absent
  MISC_FEATURE (3)..(3): Leu or Absent
  MISC_FEATURE (4)..(4): Ser or Absent
  MISC_FEATURE (5)..(5): Lys or Absent
  MISC_FEATURE (6)..(6): Pro or Absent
  MISC_FEATURE (7)..(7): Met or Absent
  MISC_FEATURE (8)..(8): Ile or Absent
  MISC_FEATURE (9)..(9): Arg or Absent
  MISC_FEATURE (10)..(10): Thr or Absent
  MISC_FEATURE (11)..(11): Lys or Absent
  MISC_FEATURE (12)..(12): Ala or Absent
  MISC_FEATURE (13)..(13): Leu or Absent
  MISC_FEATURE (14)..(14): Gln or Absent
  MISC_FEATURE (15)..(15): Ser or Absent
  MISC_FEATURE (16)..(16): Ser or Absent
  MISC_FEATURE (17)..(17): Asn or Absent
  MISC_FEATURE (18)..(18): Leu or Absent
  MISC_FEATURE (19)..(19): Ser or Absent
  MISC_FEATURE (20)..(20): Pro or Absent
  MISC_FEATURE (21)..(21): Leu or Absent
  MISC_FEATURE (22)..(22): Cys or Absent
  MISC_FEATURE (23)..(23): Thr or Absent
  MISC_FEATURE (24)..(24): Arg or Absent
  MISC_FEATURE (25)..(25): Lys or Absent
  MISC_FEATURE (26)..(26): Leu or Absent
  MISC_FEATURE (27)..(27): Gly or Absent
  MISC_FEATURE (28)..(28): Leu or Absent
  MISC_FEATURE (29)..(29): Glu or Absent
  MISC_FEATURE (30)..(30): Ser or Absent
  MISC_FEATURE (31)..(31): Asp or Absent
  MISC_FEATURE (32)..(32): Arg or Absent
  MISC_FEATURE (33)..(33): Gln or Absent
  MISC_FEATURE (34)..(34): Ala or Absent
  MISC_FEATURE (35)..(35): Glu or Absent
  MISC_FEATURE (36)..(36): Val or Absent
  MISC_FEATURE (37)..(37): Phe or Absent
  MISC_FEATURE (38)..(38): Asp or Absent
  MISC_FEATURE (39)..(39): Phe or Absent
  MISC_FEATURE (40)..(40): Gln or Absent
  MISC_FEATURE (41)..(41): Ile or Absent
  MISC_FEATURE (42)..(42): Ile or Absent
  MISC_FEATURE (43)..(43): Phe or Absent
  MISC_FEATURE (44)..(44): Asn or Absent
  MISC_FEATURE (45)..(45): Ala or Absent
  MISC_FEATURE (46)..(46): Val or Absent
  MISC_FEATURE (47)..(47): Leu or Absent
  MISC_FEATURE (48)..(48): Gly or Absent
  MISC_FEATURE (49)..(49): Thr or Absent
  MISC_FEATURE (50)..(50): Phe or Absent
  MISC_FEATURE (51)..(51): Thr or Absent
  MISC_FEATURE (52)..(52): Ala or Absent
  MISC_FEATURE (53)..(53): Gln or Absent
  MISC_FEATURE (54)..(54): Ala or Absent
  MISC_FEATURE (55)..(55): Gly or Absent
  MISC_FEATURE (56)..(56): Arg or Absent
  MISC_FEATURE (57)..(57): Leu or Absent
  MISC_FEATURE (58)..(58): Asp or Absent
  MISC_FEATURE (59)..(59): Pro or Absent
  MISC_FEATURE (60)..(60): Ala or Absent
  MISC_FEATURE (61)..(61): Glu or Absent
  MISC_FEATURE (62)..(62): Arg or Absent
  MISC_FEATURE (63)..(63): Cys or Absent
  MISC_FEATURE (64)..(64): Gln or Absent
  MISC_FEATURE (65)..(65): Phe or Absent
  MISC_FEATURE (66)..(66): Val or Absent
  MISC_FEATURE (67)..(67): Gly or Absent
  MISC_FEATURE (68)..(68): Asp or Absent
  MISC_FEATURE (69)..(69): Gln or Absent
  MISC_FEATURE (70)..(70): Ala or Absent
  MISC_FEATURE (71)..(71): Gly or Absent
  MISC_FEATURE (72)..(72): Val or Absent
  MISC_FEATURE (73)..(73): Asp or Absent
  MISC_FEATURE (74)..(74): Thr or Absent
  MISC_FEATURE (75)..(75): His or Absent
  MISC_FEATURE (76)..(76): His or Absent
  MISC_FEATURE (77)..(77): Ala or Absent
  MISC_FEATURE (78)..(78): Ile or Absent
  MISC_FEATURE (79)..(79): Phe or Absent
  MISC_FEATURE (80)..(80): Gln or Absent
  MISC_FEATURE (81)..(81): Arg or Absent
  MISC_FEATURE (82)..(82): Leu or Absent
  MISC_FEATURE (83)..(83): Gly or Absent
  MISC_FEATURE (84)..(84): His or Absent
  MISC_FEATURE (85)..(85): Pro or Absent
  MISC_FEATURE (86)..(86): Glu or Absent
  MISC_FEATURE (87)..(87): His or Absent
  MISC_FEATURE (88)..(88): Ala or Absent
  MISC_FEATURE (89)..(89): Ala or Absent
  MISC_FEATURE (90)..(90): His or Absent
  MISC_FEATURE (91)..(91): Val or Absent
  MISC_FEATURE (92)..(92): Leu or Absent
  MISC_FEATURE (93)..(93): Arg or Absent
  MISC_FEATURE (94)..(94): Ile or Absent
  MISC_FEATURE (95)..(95): Lys or Absent
  MISC_FEATURE (96)..(96): Val or Absent
  MISC_FEATURE (97)..(97): Arg or Absent
  MISC_FEATURE (98)..(98): Arg or Absent
  MISC_FEATURE (99)..(99): Gln or Absent
  MISC_FEATURE (100)..(100): Thr or Absent
  MISC_FEATURE (101)..(101): Glu or Absent
  MISC_FEATURE (102)..(102): Leu or Absent
  MISC_FEATURE (103)..(103): Gly or Absent
  MISC_FEATURE (104)..(104): Ile or Absent
  MISC_FEATURE (105)..(105): Val or Absent
  MISC_FEATURE (106)..(106): Gly or Absent
  MISC_FEATURE (107)..(107): Gln or Absent
  MISC_FEATURE (108)..(108): Arg or Absent
  MISC_FEATURE (109)..(109): Asn or Absent
  MISC_FEATURE (110)..(110): Arg or Absent
  MISC_FEATURE (111)..(111): Leu or Met
  MISC_FEATURE (112)..(112): Ser or any naturally occurring amino acid
  MISC_FEATURE (113)..(113): Leu or Ser
  MISC_FEATURE (114)..(114): Val or Ile
  MISC_FEATURE (115)..(115): Leu or Val
  MISC_FEATURE (116)..(116): Glu or Gly
  MISC_FEATURE (117)..(117): Thr or Leu
  MISC_FEATURE (118)..(118): Glu or Asn
  MISC_FEATURE (120)..(120): Trp or Arg
  MISC_FEATURE (121)..(121): Gly or Ser
  MISC_FEATURE (122)..(122): Gln or His
  MISC_FEATURE (125)..(125): Glu or Lys
  MISC_FEATURE (126)..(126): Arg or Gln
  MISC_FEATURE (127)..(127): Leu or Phe
  MISC_FEATURE (128)..(128): Phe or Leu
  MISC_FEATURE (129)..(129): Ser or Cys
  MISC_FEATURE (130)..(130): Gly or Lys
  MISC_FEATURE (131)..(131): Asn or Thr
  MISC_FEATURE (133)..(133): Gly or His
  MISC_FEATURE (134)..(134): Ile or Thr
  MISC_FEATURE (135)..(135): Phe or any naturally occurring amino acid
  MISC_FEATURE (136)..(136): Arg or any naturally occurring amino acid
  MISC_FEATURE (138)..(138): Ile or Val
  MISC_FEATURE (139)..(139): Asp or any naturally occurring amino acid
  MISC_FEATURE (140)..(140): Gln or Lys
  MISC_FEATURE (141)..(141): Asn or His
  MISC_FEATURE (142)..(142): Ser or Arg
  MISC_FEATURE (144)..(144): Absent or Arg
  MISC_FEATURE (145)..(145): Absent or Ile
  MISC_FEATURE (146)..(146): Leu or Ile
  MISC_FEATURE (147)..(147): Glu or Val
  MISC_FEATURE (148)..(148): Glu or Thr
  MISC_FEATURE (149)..(149): Arg or Leu
  MISC_FEATURE (151)..(151): Phe or Arg
  MISC_FEATURE (153)..(153): Ala or Asn
  MISC_FEATURE (154)..(154): Val or Met
  MISC_FEATURE (156)..(156): Thr or Ala
  MISC_FEATURE (157)..(157): Gly or Glu
  MISC_FEATURE (159)..(159): His or Gln
  MISC_FEATURE (161)..(161): Arg or Ser
  MISC_FEATURE (162)..(162): Thr or Pro
  MISC_FEATURE (163)..(163): Phe or Leu
  MISC_FEATURE (164)..(164): Ala or Phe
  MISC_FEATURE (165)..(165): Asp or Gln
  MISC_FEATURE (166)..(166): Ser or Arg
  MISC_FEATURE (167)..(167): Val or Gly
  MISC_FEATURE (168)..(168): Gly or Leu
  MISC_FEATURE (169)..(169): Asn or Tyr
  MISC_FEATURE (170)..(170): Val or Leu
  MISC_FEATURE (171)..(171): Leu or Arg
  MISC_FEATURE (172)..(172): Leu or Ile
  MISC_FEATURE (173)..(173): Asp or Gln
  MISC_FEATURE (175)..(175): Gly or Ile
  MISC_FEATURE (176)..(176): His or Ala
  MISC_FEATURE (177)..(177): Gly or Gln
  MISC_FEATURE (178)..(178): Leu or Ile
  MISC_FEATURE (179)..(179): Phe or Val
  MISC_FEATURE (180)..(180): Ile or Thr
  MISC_FEATURE (181)..(181): Asn or Arg
  MISC_FEATURE (182)..(182): Gln or His
  MISC_FEATURE (185)..(185): Ser or Asp
  MISC_FEATURE (186)..(186): Gly or Pro
  MISC_FEATURE (187)..(187): Asn or Gly
  MISC_FEATURE (189)..(189): Val or Gly
  MISC_FEATURE (191)..(191): Gln or Ala
  MISC_FEATURE (192)..(192): Ala or Arg
  MISC_FEATURE (194)..(194): Thr or Ala
  MISC_FEATURE (197)..(197): Gln or His
  MISC_FEATURE (199)..(199): Ala or Phe
  MISC_FEATURE (201)..(201): Arg or Gly
  MISC_FEATURE (202)..(202): His or Thr
  MISC_FEATURE (203)..(203): Leu or Asp
  MISC_FEATURE (206)..(206): Leu or Ile
  MISC_FEATURE (207)..(207): Gly or Pro
  MISC_FEATURE (209)..(209): Cys or Arg
  MISC_FEATURE (211)..(211): Ile or Glu
  MISC_FEATURE (213)..(213): Ala or Arg
  MISC_FEATURE (214)..(214): Val or Arg
  MISC_FEATURE (215)..(215): Leu or Phe
  MISC_FEATURE (216)..(216): His or Asn
  MISC_FEATURE (217)..(217): Ile or Asn
  MISC_FEATURE (220)..(220): Val or Leu
  MISC_FEATURE (221)..(221): Gly or Arg
  MISC_FEATURE (222)..(222): Ala or Gly
  MISC_FEATURE (223)..(223): Asp or Asn
  MISC_FEATURE (224)..(224): Ala or Thr
  MISC_FEATURE (225)..(225): Ser or Gln
  MISC_FEATURE (229)..(229): Val or Ile
  MISC_FEATURE (230)..(230): Ala or His
  MISC_FEATURE (231)..(231): Val or Lys
  MISC_FEATURE (232)..(232): Leu or Ala
  MISC_FEATURE (233)..(233): Gly or Ala
  MISC_FEATURE (234)..(234): Asp or Arg
  MISC_FEATURE (235)..(235): His or Asn
  MISC_FEATURE (237)..(237): Ala or Pro
  MISC_FEATURE (239)..(239): Asp or Tyr
  MISC_FEATURE (240)..(240): Gly or Arg
  MISC_FEATURE (241)..(241): Leu or Ser
  MISC_FEATURE (242)..(242): Val or Ile
  MISC_FEATURE (243)..(243): Glu or Asn
  MISC_FEATURE (244)..(244): Val or Ile
  MISC_FEATURE (245)..(245): Gly or Arg
  MISC_FEATURE (246)..(246): Val or Ile
  MISC_FEATURE (247)..(247): Val or Ser
  MISC_FEATURE (248)..(248): Glu or Gln
  MISC_FEATURE (252)..(252): Arg or Gly
  MISC_FEATURE (253)..(253): Arg or Ile
  MISC_FEATURE (254)..(254): Val or Arg
  MISC_FEATURE (260)..(260): Arg or His
  MISC_FEATURE (261)..(261): His or Ala
  MISC_FEATURE (263)..(263): Leu or Phe
  MISC_FEATURE (264)..(264): Asp or Tyr
  MISC_FEATURE (265)..(265): Val or Arg
  MISC_FEATURE (266)..(266): Leu or Cys
  MISC_FEATURE (267)..(267): Gly or Thr
  MISC_FEATURE (268)..(268): Ala or Gly
  MISC_FEATURE (269)..(269): Phe or Gln
  MISC_FEATURE (270)..(270): Ser or Gly
  MISC_FEATURE (271)..(271): His or Cys
  MISC_FEATURE (272)..(272): Gln or Asn
  MISC_FEATURE (273)..(273): Leu or Arg
  MISC_FEATURE (274)..(274): Ala or Arg
  MISC_FEATURE (276)..(276): Asp or Gly
  MISC_FEATURE (277)..(277): Leu or Ala
  MISC_FEATURE (278)..(278): Gly or His
  MISC_FEATURE (279)..(279): Arg or Ala
  MISC_FEATURE (280)..(280): Thr or Ala
  MISC_FEATURE (281)..(281): Arg or Gly
  MISC_FEATURE (282)..(282): Glu or His
  MISC_FEATURE (284)..(284): Gln or His
  MISC_FEATURE (285)..(285): Phe or Gly
  MISC_FEATURE (286)..(286): Thr or Ser
  MISC_FEATURE (287)..(287): His or Asn
  MISC_FEATURE (288)..(288): Asp or Thr
  MISC_FEATURE (289)..(289): Arg or Pro
  MISC_FEATURE (290)..(290): Val or Ile
  MISC_FEATURE (291)..(291): Thr or Val
  MISC_FEATURE (292)..(292): Gly or Asn
  MISC_FEATURE (293)..(293): Gln or Arg
  MISC_FEATURE (295)..(295): Ala or Arg
  MISC_FEATURE (296)..(296): Ala or His
  MISC_FEATURE (297)..(297): Asp or Ala
  MISC_FEATURE (298)..(298): Ile or Val
  MISC_FEATURE (299)..(299): Ala or Ile
  MISC_FEATURE (300)..(300): Arg or Ile
  MISC_FEATURE (301)..(301): Ala or Arg
  MISC_FEATURE (302)..(302): Ala or Absent
  MISC_FEATURE (303)..(303): Arg or Ile
  MISC_FEATURE (306)..(306): Ala or Arg
  MISC_FEATURE (307)..(307): Glu or Lys
  MISC_FEATURE (308)..(308): His or Lys
  MISC_FEATURE (309)..(309): Ala or Pro
  MISC_FEATURE (310)..(310): Gly or Phe
  MISC_FEATURE (312)..(312): Asn or His
  MISC_FEATURE (313)..(313): Thr or Ala
  MISC_FEATURE (314)..(314): Arg or Asp
  MISC_FEATURE (316)..(316): Leu or Gly
  MISC_FEATURE (317)..(317): Gly or Gln
  MISC_FEATURE (318)..(318): Gln or Asp
  MISC_FEATURE (319)..(319): Phe or Leu
  MISC_FEATURE (320)..(320): Ser or Leu
  MISC_FEATURE (322)..(322): Arg or Gln
  MISC_FEATURE (325)..(325): Arg or Thr
  MISC_FEATURE (326)..(326): Lys or Ser
  MISC_FEATURE (327)..(327): Arg or His
  MISC_FEATURE (328)..(328): Arg or His
  MISC_FEATURE (329)..(329): Leu or Ile
  MISC_FEATURE (331)..(331): Arg or Cys
  MISC_FEATURE (333)..(333): Leu or Phe
  MISC_FEATURE (334)..(334): Glu or Gln
  MISC_FEATURE (335)..(335): His or Gln
  MISC_FEATURE (336)..(336): His or Val
  MISC_FEATURE (337)..(337): Arg or Ala
  MISC_FEATURE (338)..(338): Ala or Val
  MISC_FEATURE (340)..(340): Arg or Gly
  MISC_FEATURE (341)..(341): Arg or Gln
  MISC_FEATURE (343)..(343): Arg or Asp
  MISC_FEATURE (345)..(345): Ala or Tyr
  MISC_FEATURE (346)..(346): Gly or Arg
  MISC_FEATURE (347)..(347): Leu or Ala
  MISC_FEATURE (349)..(349): Gly or Gln
  MISC_FEATURE (350)..(350): Asp or His
  MISC_FEATURE (351)..(351): His or Leu
  MISC_FEATURE (352)..(352): Arg or Pro
  MISC_FEATURE (353)..(353): Cys or Asp
  MISC_FEATURE (354)..(354): Arg or Gly
  MISC_FEATURE (356)..(356): Ile or Val
  MISC_FEATURE (359)..(359): Arg or His
  MISC_FEATURE (360)..(360): Asn or His
  MISC_FEATURE (362)..(362): Arg or Gln
  MISC_FEATURE (363)..(363): Arg or Asn
  MISC_FEATURE (364)..(364): His or Arg
  MISC_FEATURE (366)..(366): Asn or Gln
  MISC_FEATURE (368)..(368): Leu or Gln
  MISC_FEATURE (369)..(369): Leu or Ile
  MISC_FEATURE (370)..(370): Glu or Val
  MISC_FEATURE (371)..(371): His or Asp
  MISC_FEATURE (372)..(372): Asn or Lys
  MISC_FEATURE (373)..(373): Gln or Gly
  MISC_FEATURE (374)..(374): Thr or Absent
  MISC_FEATURE (375)..(375): Leu or Phe
  MISC_FEATURE (377)..(377): Arg or Thr
  MISC_FEATURE (379)..(379): Val or Asp
  MISC_FEATURE (380)..(380): Thr or Gln
  MISC_FEATURE (382)..(382): Asp or Arg
  MISC_FEATURE (383)..(383): His or Leu
  MISC_FEATURE (384)..(384): Ile or Thr
  MISC_FEATURE (385)..(385): Ala or Leu
  MISC_FEATURE (386)..(386): Val or Lys
  MISC_FEATURE (387)..(387): His or Glu
  MISC_FEATURE (388)..(388): Ala or Ser
  MISC_FEATURE (389)..(389): Leu or Arg
  MISC_FEATURE (390)..(390): Gly or Ala
  MISC_FEATURE (391)..(391): Phe or Met
  MISC_FEATURE (392)..(392): Phe or Pro
  MISC_FEATURE (394)..(394): Glu or Val
  MISC_FEATURE (396)..(396): Leu or Phe
  MISC_FEATURE (397)..(397): Asp or Ala
  MISC_FEATURE (398)..(398): Lys or Gln
  MISC_FEATURE (399)..(399): Arg or Ser
  MISC_FEATURE (400)..(400): Arg or Gly
  MISC_FEATURE (401)..(401): Cys or Thr
  MISC_FEATURE (402)..(402): Ile or Phe
  MISC_FEATURE (403)..(403): Arg or Leu
  MISC_FEATURE (405)..(405): Leu or Phe
  MISC_FEATURE (406)..(406): Ala or Gly
  MISC_FEATURE (407)..(407): Leu or Gln
  MISC_FEATURE (408)..(408): Gly or Pro
  MISC_FEATURE (410)..(410): Ser or Ile
  MISC_FEATURE (411)..(411): Gln or Asp
  MISC_FEATURE (415)..(415): Leu or His
  MISC_FEATURE (416)..(416): Leu or Phe
  MISC_FEATURE (417)..(417): Gln or Thr
  MISC_FEATURE (420)..(420): Gln or His
  MISC_FEATURE (421)..(421): Gln or Leu
  MISC_FEATURE (422)..(422): Thr or Arg
  MISC_FEATURE (424)..(424): Val or Leu
  MISC_FEATURE (425)..(425): Val or Ser
  MISC_FEATURE (426)..(426): Leu or Arg
  MISC_FEATURE (427)..(427): Ile or Leu
  MISC_FEATURE (429)..(429): Asp or Thr
  MISC_FEATURE (430)..(430): His or Gln
  MISC_FEATURE (431)..(431): Gln or Gly
  MISC_FEATURE (432)..(432): Leu or Val
  MISC_FEATURE (433)..(433): Glu or Arg
  MISC_FEATURE (434)..(434): Pro or Asn
  MISC_FEATURE (435)..(435): Ala or Val
  MISC_FEATURE (436)..(436): Thr or Ala
  MISC_FEATURE (438)..(438): Leu or Gln
  MISC_FEATURE (439)..(439): Val or Leu
  MISC_FEATURE (440)..(440): Thr or Asn
  MISC_FEATURE (442)..(442): Leu or Ile
  MISC_FEATURE (443)..(443): Phe or Ala
  MISC_FEATURE (444)..(444): Gly or His
  MISC_FEATURE (445)..(445): Gly or Cys
  MISC_FEATURE (446)..(446): Gln or Ala
  MISC_FEATURE (447)..(447): Arg or Val
  MISC_FEATURE (450)..(450): Gly or Val
  MISC_FEATURE (451)..(451): Arg or Leu
  MISC_FEATURE (452)..(452): Gln or Lys
  MISC_FEATURE (453)..(453): Arg or Cys
  MISC_FEATURE (454)..(454): Leu or Thr
  MISC_FEATURE (455)..(455): Val or Ile
  MISC_FEATURE (456)..(456): Ser or Gly
  MISC_FEATURE (457)..(457): Arg or Absent
  MISC_FEATURE (458)..(458): Leu or Absent
  MISC_FEATURE (459)..(459): Asn or Absent
  MISC_FEATURE (460)..(460): Arg or Absent
  MISC_FEATURE (461)..(461): Pro or Absent
  MISC_FEATURE (462)..(462): Thr or Absent
  MISC_FEATURE (463)..(463): Arg or Absent
  MISC_FEATURE (464)..(464): Leu or Absent
  MISC_FEATURE (465)..(465): Gly or Absent
  MISC_FEATURE (466)..(466): Arg or Absent
  MISC_FEATURE (467)..(467): Ala or Absent
  MISC_FEATURE (468)..(468): His or Absent
  MISC_FEATURE (469)..(469): Phe or Absent
  MISC_FEATURE (470)..(470): Arg or Absent
  MISC_FEATURE (471)..(471): His or Absent
  MISC_FEATURE (472)..(472): Ser or Absent
  MISC_FEATURE (473)..(473): Ala or Absent
  MISC_FEATURE (474)..(474): Glu or Absent
  MISC_FEATURE (475)..(475): Asp or Absent
  MISC_FEATURE (476)..(476): Leu or Absent
  MISC_FEATURE (477)..(477): Val or Absent
  MISC_FEATURE (478)..(478): Gly or Absent
  MISC_FEATURE (479)..(479): Arg or Absent
  MISC_FEATURE (480)..(480): Arg or Absent
  MISC_FEATURE (481)..(481): Val or Absent
  MISC_FEATURE (482)..(482): Val or Absent
  MISC_FEATURE (483)..(483): Asp or Absent
  MISC_FEATURE (484)..(484): Leu or Absent
  MISC_FEATURE (485)..(485): Asp or Absent
  MISC_FEATURE (486)..(486): Arg or Absent
  MISC_FEATURE (487)..(487): Leu or Absent
  MISC_FEATURE (488)..(488): Thr or Absent
  MISC_FEATURE (489)..(489): Thr or Absent
  MISC_FEATURE (490)..(490): Val or Absent
  MISC_FEATURE (491)..(491): Arg or Absent
  MISC_FEATURE (492)..(492): Ile or Absent
  MISC_FEATURE (493)..(493): Gln or Absent
  MISC_FEATURE (494)..(494): Pro or Absent
  MISC_FEATURE (495)..(495): Leu or Absent
  MISC_FEATURE (496)..(496): Ala or Absent
  MISC_FEATURE (497)..(497): Val or Absent
  MISC_FEATURE (498)..(498): Asp or Absent
  MISC_FEATURE (499)..(499): Val or Absent
  MISC_FEATURE (500)..(500): Gly or Absent
  MISC_FEATURE (501)..(501): Leu or Absent
  MISC_FEATURE (502)..(502): Leu or Absent
  MISC_FEATURE (503)..(503): Ala or Absent
  MISC_FEATURE (504)..(504): Glu or Absent
  MISC_FEATURE (505)..(505): Gln or Absent
  MISC_FEATURE (506)..(506): Gly or Absent
  MISC_FEATURE (507)..(507): Gly or Absent
  MISC_FEATURE (508)..(508): Ile or Absent
  MISC_FEATURE (509)..(509): Phe or Absent
  MISC_FEATURE (510)..(510): Lys or Absent
  MISC_FEATURE (511)..(511): Leu or Absent
  MISC_FEATURE (512)..(512): His or Absent
  MISC_FEATURE (513)..(513): Gly or Absent
  MISC_FEATURE (514)..(514): Pro or Absent
  MISC_FEATURE (515)..(515): Ala or Absent
  MISC_FEATURE (516)..(516): Gly or Absent
  MISC_FEATURE (517)..(517): Ala or Absent
  MISC_FEATURE (518)..(518): Cys or Absent
  MISC_FEATURE (519)..(519): Phe or Absent
  MISC_FEATURE (520)..(520): Phe or Absent
  MISC_FEATURE (521)..(521): Val or Absent
  MISC_FEATURE (522)..(522): Gln or Absent
  MISC_FEATURE (523)..(523): Thr or Absent
  MISC_FEATURE (524)..(524): Cys or Absent
  MISC_FEATURE (525)..(525): Asp or Absent
  MISC_FEATURE (526)..(526): Lys or Absent
  MISC_FEATURE (527)..(527): Ser or Absent
  MISC_FEATURE (528)..(528): Gly or Absent
  MISC_FEATURE (529)..(529): Ala or Absent
  MISC_FEATURE (530)..(530): Pro or Absent
  MISC_FEATURE (531)..(531): Gly or Absent
  MISC_FEATURE (532)..(532): Leu or Absent
  MISC_FEATURE (533)..(533): Ile or Absent
  MISC_FEATURE (534)..(534): Lys or Absent
  MISC_FEATURE (535)..(535): Gly or Absent
XXXXXXXXXXXXXXXXXXXXXXXXXXXXXXXXXXXXXXXXXXXXXXXXXXXXXXXXXXXXXXXXXXXXXXXXXXXXXXXXXXXXXXXXXXXXXXXXXXXXXXXXXXXXXXXXXXXXXXQXXXRTXXXXXXXGXXXXHXXXXXRXXXXXXAXQXXAXXQXGXXXXXXXXXXXXXLXXXXXXXXRAXXXAXFXXVXYFXLXDXXXELXXEXVXHXXXXXDAXXXXXXLTVXXXXXXXRXFXXXXXXXXXXHDKXXXTAQLQXXFXXXXXXXXXXXXTXXXXXXXGXXXXXXXXXXLXXXXXXXXXHHXXXXXRXXXTXXXXXQXQRXXXXXRXRXXXXXXTXXQXRXXXAXXXXXXEXPRXXRXXXTXRXXXXXXXXVXLXXGXXXXXXXXXXXSXPXXXXXXXXDXXXXLXXRLAXXXGHXXXQXXXXLXXXXXXXXQXXXAXXXXXXTPXXXXXXXXXXXXXXXXXXXXXXXXXXXXXXXXXXXXXXXXXXXXXXXXXXXXXXXXXXXXXXXXXXXXXXXXXXXXXXXXXXXXXX

SEQ ID NO: 17397 - protein, 622 aa, Artificial
  Consensus of seq. id no. 217 and its homologs
  MISC_FEATURE (1)..(1): Met or Absent
  MISC_FEATURE (2)..(2): Ala or Absent
  MISC_FEATURE (3)..(3): Gln or Absent
  MISC_FEATURE (4)..(4): Val or Absent
  MISC_FEATURE (5)..(5): Ser or Absent
  MISC_FEATURE (6)..(6): Arg or Absent
  MISC_FEATURE (7)..(7): Ile or Absent
  MISC_FEATURE (8)..(8): Cys or Absent
  MISC_FEATURE (9)..(9): Asn or Absent
  MISC_FEATURE (10)..(10): Gly or Absent
  MISC_FEATURE (11)..(11): Val or Absent
  MISC_FEATURE (12)..(12): Gln or Absent
  MISC_FEATURE (13)..(13): Asn or Absent
  MISC_FEATURE (14)..(14): Pro or Absent
  MISC_FEATURE (15)..(15): Ser or Absent
  MISC_FEATURE (16)..(16): Leu or Absent
  MISC_FEATURE (17)..(17): Ile or Absent
  MISC_FEATURE (18)..(18): Ser or Absent
  MISC_FEATURE (19)..(19): Asn or Absent
  MISC_FEATURE (20)..(20): Leu or Absent
  MISC_FEATURE (21)..(21): Ser or Absent
  MISC_FEATURE (22)..(22): Lys or Absent
  MISC_FEATURE (23)..(23): Ser or Absent
  MISC_FEATURE (24)..(24): Ser or Absent
  MISC_FEATURE (25)..(25): Gln or Absent
  MISC_FEATURE (26)..(26): Arg or Absent
  MISC_FEATURE (27)..(27): Lys or Absent
  MISC_FEATURE (28)..(28): Ser or Absent
  MISC_FEATURE (29)..(29): Pro or Absent
  MISC_FEATURE (30)..(30): Leu or Absent
  MISC_FEATURE (31)..(31): Ser or Absent
  MISC_FEATURE (32)..(32): Val or Absent
  MISC_FEATURE (33)..(33): Ser or Absent
  MISC_FEATURE (34)..(34): Leu or Absent
  MISC_FEATURE (35)..(35): Lys or Absent
  MISC_FEATURE (36)..(36): Thr or Absent
  MISC_FEATURE (37)..(37): Gln or Absent
  MISC_FEATURE (38)..(38): Gln or Absent
  MISC_FEATURE (39)..(39): His or Absent
  MISC_FEATURE (40)..(40): Pro or Absent
  MISC_FEATURE (41)..(41): Arg or Absent
  MISC_FEATURE (42)..(42): Ala or Absent
  MISC_FEATURE (43)..(43): Tyr or Absent
  MISC_FEATURE (44)..(44): Pro or Absent
  MISC_FEATURE (45)..(45): Ile or Absent
  MISC_FEATURE (46)..(46): Ser or Absent
  MISC_FEATURE (47)..(47): Ser or Absent
  MISC_FEATURE (48)..(48): Ser or Absent
  MISC_FEATURE (49)..(49): Trp or Absent
  MISC_FEATURE (50)..(50): Gly or Absent
  MISC_FEATURE (51)..(51): Leu or Absent
  MISC_FEATURE (52)..(52): Lys or Absent
  MISC_FEATURE (53)..(53): Lys or Absent
  MISC_FEATURE (54)..(54): Ser or Absent
  MISC_FEATURE (55)..(55): Gly or Absent
  MISC_FEATURE (56)..(56): Met or Absent
  MISC_FEATURE (57)..(57): Thr or Absent
  MISC_FEATURE (58)..(58): Leu or Absent
  MISC_FEATURE (59)..(59): Ile or Absent
  MISC_FEATURE (60)..(60): Gly or Absent
  MISC_FEATURE (61)..(61): Ser or Absent
  MISC_FEATURE (62)..(62): Glu or Absent
  MISC_FEATURE (63)..(63): Leu or Absent
  MISC_FEATURE (64)..(64): Arg or Absent
  MISC_FEATURE (65)..(65): Pro or Absent
  MISC_FEATURE (66)..(66): Leu or Absent
  MISC_FEATURE (67)..(67): Lys or Absent
  MISC_FEATURE (68)..(68): Val or Absent
  MISC_FEATURE (69)..(69): Met or Absent
  MISC_FEATURE (70)..(70): Ser or Absent
  MISC_FEATURE (71)..(71): Ser or Absent
  MISC_FEATURE (72)..(72): Val or Absent
  MISC_FEATURE (73)..(73): Ser or Absent
  MISC_FEATURE (77)..(77): Met or Val or Ala or Ser
  MISC_FEATURE (82)..(82): Thr or Asn or His
  MISC_FEATURE (86)..(86): Lys or Asn or Gln or Ser or Ile
  MISC_FEATURE (87)..(87): Lys or Pro or Asn or Ala
  MISC_FEATURE (88)..(88): Ala or Absent or Pro or Cys
  MISC_FEATURE (89)..(89): Gly or Ser or Cys or Arg or Tyr or Val or Phe
  MISC_FEATURE (90)..(90): Phe or Leu or Ala or Val or Ile
  MISC_FEATURE (98)..(98): Ala or Ser or Asn
  MISC_FEATURE (99)..(99): Ser or Gln or His
  MISC_FEATURE (100)..(100): Thr or Arg or Pro or Asn or Gly
  MISC_FEATURE (104)..(104): Ile or Leu or Phe
  MISC_FEATURE (106)..(106): Arg or Val or Ile or Leu
  MISC_FEATURE (111)..(111): Absent or Gln or His or Pro
  MISC_FEATURE (113)..(113): Absent or His or Gln
  MISC_FEATURE (114)..(114): Absent or Pro or Gln or Lys
  MISC_FEATURE (115)..(115): Absent or Arg or Pro or Ala
  MISC_FEATURE (116)..(116): Absent or Ala or Gly or Arg or Thr
  MISC_FEATURE (117)..(117): Absent or Tyr or Ala or Gln
  MISC_FEATURE (118)..(118): Absent or Pro or Tyr
  MISC_FEATURE (119)..(119): Absent or Ile or Gln or Pro or Ser
  MISC_FEATURE (120)..(120): Absent or Ser or Ile
  MISC_FEATURE (129)..(129): Thr or Gly or Ala or Asn or Ser
  MISC_FEATURE (130)..(130): Thr or Met or Absent
  MISC_FEATURE (131)..(131): Ala or Thr or Val or Absent or Met or Ile
  MISC_FEATURE (133)..(133): Trp or Ile or Asn or Ser
  MISC_FEATURE (134)..(134): Ser or Gly or Arg or Asp
  MISC_FEATURE (136)..(136): Ala or Glu or Val
  MISC_FEATURE (137)..(137): Arg or Leu or Thr or Ile
  MISC_FEATURE (140)..(140): Arg or Leu or Val or Phe
  MISC_FEATURE (143)..(143): Cys or Met or Thr
  MISC_FEATURE (144)..(144): Ser or Ala
  MISC_FEATURE (149)..(149): Ser or Ala
  MISC_FEATURE (150)..(150): Absent or Cys or Glu
  MISC_FEATURE (151)..(151): Absent or Met or Lys
  MISC_FEATURE (152)..(152): Absent or Leu or Ala or Pro
  MISC_FEATURE (153)..(153): Absent or His or Ser
  MISC_FEATURE (154)..(154): Absent or Gly or Thr
  MISC_FEATURE (155)..(155): Absent or Ala
  MISC_FEATURE (156)..(156): Absent or Ser
  MISC_FEATURE (157)..(157): Absent or Ser
  MISC_FEATURE (158)..(158): Absent or Arg or Pro
  MISC_FEATURE (159)..(159): Absent or Pro or Glu
  MISC_FEATURE (160)..(160): Absent or Ala or Ile
  MISC_FEATURE (161)..(161): Absent or Thr or Val or Glu
  MISC_FEATURE (162)..(162): Absent or Ala or Leu or Val
  MISC_FEATURE (163)..(163): Absent or Arg or Gln or Glu
  MISC_FEATURE (164)..(164): Absent or Lys or Pro
  MISC_FEATURE (165)..(165): Absent or Ser or Ile
  MISC_FEATURE (166)..(166): Absent or Ser or Arg or Lys
  MISC_FEATURE (167)..(167): Absent or Gly or Glu or Asp
  MISC_FEATURE (168)..(168): Absent or Leu or Ile or Phe
  MISC_FEATURE (171)..(171): Absent or Thr or Leu or Trp
  MISC_FEATURE (172)..(172): Absent or Val or Ile
  MISC_FEATURE (173)..(173): Absent or Arg or Lys
  MISC_FEATURE (174)..(174): Absent or Ile or Leu
  MISC_FEATURE (177)..(177): Absent or Asp or Ser or Thr
  MISC_FEATURE (180)..(180): Absent or Ile or Leu
  MISC_FEATURE (182)..(182): Absent or His or Asn
  MISC_FEATURE (184)..(184): Absent or Ser or Ile
  MISC_FEATURE (185)..(185): Absent or Phe or Leu
  MISC_FEATURE (186)..(186): Absent or Met or Leu
  MISC_FEATURE (187)..(187): Absent or Phe or Leu
  MISC_FEATURE (188)..(188): Absent or Gly or Ala
  MISC_FEATURE (189)..(189): Absent or Gly or Ala
  MISC_FEATURE (191)..(191): Absent or Ala or Ser
  MISC_FEATURE (192)..(192): Absent or Ser or Glu
  MISC_FEATURE (194)..(194): Absent or Glu or Thr
  MISC_FEATURE (196)..(196): Absent or Arg or Val
  MISC_FEATURE (197)..(197): Absent or Ile or Val
  MISC_FEATURE (198)..(198): Absent or Thr or Asp
  MISC_FEATURE (199)..(199): Absent or Gly or Asn
  MISC_FEATURE (202)..(202): Absent or Glu or Asn
  MISC_FEATURE (203)..(203): Absent or Gly or Ser
  MISC_FEATURE (204)..(204): Absent or Glu or Asp
  MISC_FEATURE (206)..(206): Absent or Val or Ile
  MISC_FEATURE (207)..(207): Absent or Ile or Asn or His
  MISC_FEATURE (208)..(208): Absent or Asn or Tyr
  MISC_FEATURE (209)..(209): Absent or Thr or Met
  MISC_FEATURE (210)..(210): Absent or Gly or Leu
  MISC_FEATURE (211)..(211): Absent or Lys or Asp or Gly
  MISC_FEATURE (213)..(213): Absent or Met or Leu
  MISC_FEATURE (214)..(214): Absent or Gln or Lys or Asn
  MISC_FEATURE (215)..(215): Absent or Ala or Arg or Lys or Trp
  MISC_FEATURE (216)..(216): Absent or Met or Leu
  MISC_FEATURE (218)..(218): Absent or Ala or Leu
  MISC_FEATURE (219)..(219): Absent or Arg or Asn
  MISC_FEATURE (220)..(220): Absent or Ile or Val
  MISC_FEATURE (221)..(221): Absent or Arg or Glu
  MISC_FEATURE (222)..(222): Absent or Lys or Thr or Arg
  MISC_FEATURE (223)..(223): Absent or Glu or Asp
  MISC_FEATURE (224)..(224): Absent or Gly or Ser or Lys
  MISC_FEATURE (225)..(225): Absent or Asp or Glu or Val
  MISC_FEATURE (226)..(226): Absent or Thr or Asn or Ile
  MISC_FEATURE (227)..(227): Absent or Trp or Asn
  MISC_FEATURE (228)..(228): Absent or Ile or Arg or Gly
  MISC_FEATURE (229)..(229): Absent or Ile or Ala
  MISC_FEATURE (230)..(230): Absent or Asp or Val
  MISC_FEATURE (231)..(231): Absent or Gly or Val
  MISC_FEATURE (232)..(232): Absent or Val or Glu
  MISC_FEATURE (234)..(234): Absent or Asn or Cys
  MISC_FEATURE (237)..(237): Absent or Leu or Ile
  MISC_FEATURE (238)..(238): Absent or Leu or Phe
  MISC_FEATURE (239)..(239): Absent or Ala or Pro
  MISC_FEATURE (240)..(240): Absent or Pro or Ala
  MISC_FEATURE (241)..(241): Absent or Ser
  MISC_FEATURE (242)..(242): Absent or Ile or Leu or Val
  MISC_FEATURE (243)..(243): Absent or Asp
  MISC_FEATURE (244)..(244): Absent or Ser
  MISC_FEATURE (245)..(245): Absent or Lys
  MISC_FEATURE (246)..(246): Absent or Ser or Gly
  MISC_FEATURE (247)..(247): Absent or Glu or Asp
  MISC_FEATURE (248)..(248): Absent or Ala or Ile
  MISC_FEATURE (249)..(249): Absent or Pro or Glu
  MISC_FEATURE (250)..(250): Absent or Leu
  MISC_FEATURE (251)..(251): Absent or Asp or Tyr
  MISC_FEATURE (252)..(252): Absent or Phe or Leu
  MISC_FEATURE (253)..(253): Absent or Gly
  MISC_FEATURE (254)..(254): Absent or Asn
  MISC_FEATURE (255)..(255): Absent or Ala
  MISC_FEATURE (256)..(256): Absent or Ala or Gly
  MISC_FEATURE (257)..(257): Absent or Thr
  MISC_FEATURE (258)..(258): Absent or Gly or Ala
  MISC_FEATURE (259)..(259): Absent or Cys or Met
  MISC_FEATURE (260)..(260): Absent or Arg
  MISC_FEATURE (261)..(261): Absent or Leu or Pro
  MISC_FEATURE (262)..(262): Absent or Thr or Leu
  MISC_FEATURE (263)..(263): Absent or Met or Thr
  MISC_FEATURE (264)..(264): Absent or Gly or Ala
  MISC_FEATURE (265)..(265): Absent or Leu or Ala
  MISC_FEATURE (266)..(266): Absent or Val
  MISC_FEATURE (267)..(267): Absent or Gly or Thr
  MISC_FEATURE (268)..(268): Absent or Val or Ala
  MISC_FEATURE (269)..(269): Absent or Tyr or Ala
  MISC_FEATURE (270)..(270): Absent or Asp or Gly
  MISC_FEATURE (271)..(271): Absent or Phe or Gly
  MISC_FEATURE (272)..(272): Absent or Asp or Asn
  MISC_FEATURE (273)..(273): Absent or Ser or Ala
  MISC_FEATURE (274)..(274): Absent or Thr or Ser or Trp
  MISC_FEATURE (275)..(275): Absent or Phe or Tyr
  MISC_FEATURE (276)..(276): Absent or Ile or Val
  MISC_FEATURE (277)..(277): Absent or Gly or Leu
  MISC_FEATURE (278)..(278): Absent or Asp
  MISC_FEATURE (279)..(279): Absent or Gly
  MISC_FEATURE (280)..(280): Absent or Val
  MISC_FEATURE (281)..(281): Absent or Ala or Pro
  MISC_FEATURE (282)..(282): Absent or Ser or Arg
  MISC_FEATURE (283)..(283): Absent or Leu or Met
  MISC_FEATURE (284)..(284): Absent or Thr or Arg
  MISC_FEATURE (285)..(285): Absent or Lys or Glu
  MISC_FEATURE (286)..(286): Absent or Arg
  MISC_FEATURE (287)..(287): Absent or Pro
  MISC_FEATURE (288)..(288): Absent or Met or Ile
  MISC_FEATURE (289)..(289): Absent or Gly
  MISC_FEATURE (290)..(290): Absent or Arg or Asp
  MISC_FEATURE (291)..(291): Absent or Val or Leu
  MISC_FEATURE (292)..(292): Absent or Leu or Val
  MISC_FEATURE (293)..(293): Absent or Asn or Val
  MISC_FEATURE (294)..(294): Absent or Pro or Gly
  MISC_FEATURE (295)..(295): Absent or Leu
  MISC_FEATURE (296)..(296): Absent or Arg or Lys
  MISC_FEATURE (297)..(297): Absent or Glu or Gln
  MISC_FEATURE (298)..(298): Absent or Met or Leu
  MISC_FEATURE (299)..(299): Absent or Gly
  MISC_FEATURE (300)..(300): Absent or Val or Ala
  MISC_FEATURE (301)..(301): Absent or Gln or Asp
  MISC_FEATURE (302)..(302): Absent or Val
  MISC_FEATURE (303)..(303): Absent or Lys or Glu or Asp
  MISC_FEATURE (304)..(304): Absent or Ser or Cys
  MISC_FEATURE (305)..(305): Absent or Glu or Thr or Phe
  MISC_FEATURE (306)..(306): Absent or Asp or Leu
  MISC_FEATURE (307)..(307): Absent or Gly
  MISC_FEATURE (308)..(308): Absent or Asp or Thr
  MISC_FEATURE (309)..(309): Absent or Arg or Asn
  MISC_FEATURE (310)..(310): Absent or Leu or Cys
  MISC_FEATURE (311)..(311): Absent or Pro
  MISC_FEATURE (312)..(312): Absent or Val or Pro
  MISC_FEATURE (313)..(313): Absent or Thr or Val
  MISC_FEATURE (314)..(314): Absent or Arg
  MISC_FEATURE (315)..(315): Absent or Val
  MISC_FEATURE (316)..(316): Absent or Asn
  MISC_FEATURE (317)..(317): Absent or Ala
  MISC_FEATURE (318)..(318): Absent or Asn or Gly
  MISC_FEATURE (319)..(319): Absent or Gly
  MISC_FEATURE (320)..(320): Absent or Gly
  MISC_FEATURE (321)..(321): Absent or Leu
  MISC_FEATURE (322)..(322): Absent or Arg or Pro
  MISC_FEATURE (323)..(323): Absent or Gly
  MISC_FEATURE (324)..(324): Absent or Pro or Gly
  MISC_FEATURE (325)..(325): Absent or Lys
  MISC_FEATURE (326)..(326): Absent or Thr or Val
  MISC_FEATURE (327)..(327): Absent or Pro or Lys
  MISC_FEATURE (328)..(328): Absent or Thr or Leu
  MISC_FEATURE (329)..(329): Absent or Pro or Ser or Phe
  MISC_FEATURE (330)..(330): Absent or Ile or Gly
  MISC_FEATURE (331)..(331): Absent or Thr or Ser
  MISC_FEATURE (332)..(332): Absent or Tyr or Ile
  MISC_FEATURE (333)..(333): Absent or Arg or Ser
  MISC_FEATURE (334)..(334): Absent or Val or Ser
  MISC_FEATURE (335)..(335): Absent or Pro or Gln
  MISC_FEATURE (336)..(336): Absent or Met or Tyr
  MISC_FEATURE (337)..(337): Absent or Ala or Leu
  MISC_FEATURE (338)..(338): Absent or Ser or Thr
  MISC_FEATURE (339)..(339): Absent or Ala
  MISC_FEATURE (340)..(340): Absent or Gln or Leu
  MISC_FEATURE (341)..(341): Absent or Val or Leu
  MISC_FEATURE (342)..(342): Absent or Lys or Met
  MISC_FEATURE (343)..(343): Absent or Ser or Ala
  MISC_FEATURE (344)..(344): Absent or Ala
  MISC_FEATURE (345)..(345): Absent or Val or Pro
  MISC_FEATURE (346)..(346): Absent or Leu
  MISC_FEATURE (347)..(347): Absent or Leu or Ala
  MISC_FEATURE (348)..(348): Absent or Ala or Leu
  MISC_FEATURE (349)..(349): Absent or Gly
  MISC_FEATURE (350)..(350): Absent or Leu or Asp
  MISC_FEATURE (351)..(351): Absent or Asn or Val
  MISC_FEATURE (352)..(352): Absent or Thr or Glu
  MISC_FEATURE (353)..(353): Absent or Pro or Ile
  MISC_FEATURE (354)..(354): Absent or Gly or Glu
  MISC_FEATURE (355)..(355): Absent or Ile
  MISC_FEATURE (356)..(356): Absent or Thr or Val or Arg or Ile
  MISC_FEATURE (357)..(357): Absent or Thr or Asp or Val
  MISC_FEATURE (358)..(358): Absent or Val or Lys or Arg
  MISC_FEATURE (359)..(359): Absent or Ile or Leu
  MISC_FEATURE (360)..(360): Absent or Glu or Ile
  MISC_FEATURE (361)..(361): Absent or Pro or Ser
  MISC_FEATURE (362)..(362): Absent or Ile or Val
  MISC_FEATURE (363)..(363): Absent or Met or Pro
  MISC_FEATURE (364)..(364): Absent or Thr or Tyr
  MISC_FEATURE (365)..(365): Absent or Arg or Val
  MISC_FEATURE (366)..(366): Absent or Asp or Glu
  MISC_FEATURE (367)..(367): Absent or His or Met or Val
  MISC_FEATURE (368)..(368): Absent or Thr
  MISC_FEATURE (369)..(369): Absent or Glu or Leu
  MISC_FEATURE (370)..(370): Absent or Lys
  MISC_FEATURE (371)..(371): Absent or Met or Leu
  MISC_FEATURE (372)..(372): Absent or Leu or Met
  MISC_FEATURE (373)..(373): Absent or Gln or Glu
  MISC_FEATURE (374)..(374): Absent or Gly or Arg
  MISC_FEATURE (375)..(375): Absent or Phe
  MISC_FEATURE (376)..(376): Absent or Gly
  MISC_FEATURE (377)..(377): Absent or Ala
  MISC_FEATURE (378)..(378): Absent or Asn
  MISC_FEATURE (379)..(379): Absent or Leu or Val
  MISC_FEATURE (380)..(380): Absent or Thr or Ser
  MISC_FEATURE (381)..(381): Absent or Val or Ala
  MISC_FEATURE (382)..(382): Absent or Glu
  MISC_FEATURE (383)..(383): Absent or Thr or His
  MISC_FEATURE (384)..(384): Absent or Asp or Ser or Trp
  MISC_FEATURE (385)..(385): Absent or Ala or Asp or Glu
  MISC_FEATURE (386)..(386): Absent or Asp or Ser
  MISC_FEATURE (387)..(387): Absent or Gly or Trp
  MISC_FEATURE (388)..(388): Absent or Val or Asp
  MISC_FEATURE (389)..(389): Absent or Arg
  MISC_FEATURE (390)..(390): Absent or Thr or Phe
  MISC_FEATURE (391)..(391): Absent or Ile or Phe or Leu
  MISC_FEATURE (392)..(392): Absent or Arg or Val
  MISC_FEATURE (393)..(393): Absent or Leu or Lys or His
  MISC_FEATURE (394)..(394): Absent or Glu or Gly
  MISC_FEATURE (395)..(395): Absent or Gly
  MISC_FEATURE (396)..(396): Absent or Arg or Gln
  MISC_FEATURE (397)..(397): Absent or Gly or Lys
  MISC_FEATURE (398)..(398): Absent or Lys or Tyr
  MISC_FEATURE (399)..(399): Absent or Leu or Lys
  MISC_FEATURE (400)..(400): Absent or Thr or Ser
  MISC_FEATURE (401)..(401): Absent or Gly or Pro
  MISC_FEATURE (402)..(402): Absent or Gln or Gly
  MISC_FEATURE (403)..(403): Absent or Val or Asn
  MISC_FEATURE (404)..(404): Absent or Ile or Ala
  MISC_FEATURE (405)..(405): Absent or Asp or Tyr
  MISC_FEATURE (406)..(406): Absent or Val
  MISC_FEATURE (407)..(407): Absent or Pro or Glu
  MISC_FEATURE (408)..(408): Absent or Gly
  MISC_FEATURE (409)..(409): Absent or Asp
  MISC_FEATURE (410)..(410): Absent or Pro or Ala
  MISC_FEATURE (411)..(411): Absent or Ser
  MISC_FEATURE (412)..(412): Absent or Ser
  MISC_FEATURE (413)..(413): Absent or Thr or Ala
  MISC_FEATURE (414)..(414): Absent or Ala or Cys or Ser
  MISC_FEATURE (415)..(415): Absent or Phe or Tyr
  MISC_FEATURE (416)..(416): Absent or Pro
  MISC_FEATURE (417)..(417): Absent or Leu or Phe
  MISC_FEATURE (418)..(418): Absent or Val or Leu
  MISC_FEATURE (419)..(419): Absent or Ala
  MISC_FEATURE (420)..(420): Absent or Ala or Gly
  MISC_FEATURE (421)..(421): Absent or Leu or Ala
  MISC_FEATURE (422)..(422): Absent or Leu or Ala
  MISC_FEATURE (423)..(423): Absent or Val or Ile
  MISC_FEATURE (424)..(424): Absent or Pro or Thr
  MISC_FEATURE (425)..(425): Absent or Gly
  MISC_FEATURE (426)..(426): Absent or Ser or Glu or Gly
  MISC_FEATURE (427)..(427): Absent or Asp or Thr
  MISC_FEATURE (428)..(428): Absent or Val
  MISC_FEATURE (429)..(429): Absent or Thr
  MISC_FEATURE (430)..(430): Absent or Ile or Val
  MISC_FEATURE (431)..(431): Absent or Leu or Glu
  MISC_FEATURE (432)..(432): Absent or Asn or Gly
  MISC_FEATURE (433)..(433): Absent or Val or Cys
  MISC_FEATURE (434)..(434): Absent or Leu or Gly
  MISC_FEATURE (435)..(435): Absent or Met or Thr
  MISC_FEATURE (436)..(436): Absent or Asn or Thr or Lys
  MISC_FEATURE (437)..(437): Absent or Pro or Ser
  MISC_FEATURE (438)..(438): Absent or Thr or Leu
  MISC_FEATURE (439)..(439): Absent or Arg or Gln
  MISC_FEATURE (440)..(440): Absent or Gly
  MISC_FEATURE (441)..(441): Absent or Asp
  MISC_FEATURE (442)..(442): Absent or Thr or Val
  MISC_FEATURE (443)..(443): Absent or Gly or Lys
  MISC_FEATURE (444)..(444): Absent or Leu or Phe
  MISC_FEATURE (445)..(445): Absent or Ile or Ala
  MISC_FEATURE (446)..(446): Absent or Leu or Glu
  MISC_FEATURE (447)..(447): Absent or Thr or Val
  MISC_FEATURE (448)..(448): Absent or Leu
  MISC_FEATURE (449)..(449): Absent or Gln or Glu
  MISC_FEATURE (450)..(450): Absent or Glu or Lys
  MISC_FEATURE (451)..(451): Absent or Met
  MISC_FEATURE (452)..(452): Absent or Gly
  MISC_FEATURE (453)..(453): Absent or Ala or Cys
  MISC_FEATURE (454)..(454): Absent or Asp or Lys
  MISC_FEATURE (455)..(455): Absent or Ile or Val
  MISC_FEATURE (456)..(456): Absent or Glu or Ser or Trp
  MISC_FEATURE (457)..(457): Absent or Val or Trp
  MISC_FEATURE (458)..(458): Absent or Ile or Thr
  MISC_FEATURE (459)..(459): Absent or Asn or Glu
  MISC_FEATURE (460)..(460): Absent or Pro or Asn
  MISC_FEATURE (461)..(461): Absent or Arg or Ser
  MISC_FEATURE (462)..(462): Absent or Leu or Val
  MISC_FEATURE (463)..(463): Absent or Ala or Thr
  MISC_FEATURE (464)..(464): Absent or Gly or Val
  MISC_FEATURE (465)..(465): Absent or Gly or Thr
  MISC_FEATURE (466)..(466): Absent or Glu or Gly
  MISC_FEATURE (467)..(467): Absent or Asp or Pro
  MISC_FEATURE (468)..(468): Absent or Val or Pro or Ser
  MISC_FEATURE (469)..(469): Absent or Ala or Arg
  MISC_FEATURE (470)..(470): Absent or Asp
  MISC_FEATURE (471)..(471): Absent or Leu or Ala
  MISC_FEATURE (472)..(472): Absent or Arg or Phe
  MISC_FEATURE (473)..(473): Absent or Val or Gly
  MISC_FEATURE (474)..(474): Absent or Arg or Met
  MISC_FEATURE (475)..(475): Absent or Ser or Arg
  MISC_FEATURE (476)..(476): Absent or Ser
  MISC_FEATURE (477)..(477): Absent or Thr or His or Val
  MISC_FEATURE (478)..(478): Absent or Leu
  MISC_FEATURE (479)..(479): Absent or Lys or Arg
  MISC_FEATURE (480)..(480): Absent or Gly or Ala
  MISC_FEATURE (481)..(481): Absent or Val or Ile
  MISC_FEATURE (482)..(482): Absent or Thr or Asp
  MISC_FEATURE (483)..(483): Absent or Val
  MISC_FEATURE (484)..(484): Absent or Pro or Asn
  MISC_FEATURE (485)..(485): Absent or Glu or Met
  MISC_FEATURE (486)..(486): Absent or Asp or Asn
  MISC_FEATURE (487)..(487): Absent or Arg or Lys
  MISC_FEATURE (488)..(488): Absent or Ala or Met
  MISC_FEATURE (489)..(489): Absent or Pro
  MISC_FEATURE (490)..(490): Absent or Ser
  MISC_FEATURE (491)..(491): Absent or Met
  MISC_FEATURE (492)..(492): Absent or Ile
  MISC_FEATURE (493)..(493): Absent or Asp
  MISC_FEATURE (494)..(494): Absent or Glu or Val
  MISC_FEATURE (495)..(495): Absent or Tyr or Ala
  MISC_FEATURE (496)..(496): Absent or Pro or Met or Val
  MISC_FEATURE (497)..(497): Absent or Ile or Thr
  MISC_FEATURE (498)..(498): Absent or Leu
  MISC_FEATURE (499)..(499): Absent or Ala
  MISC_FEATURE (500)..(500): Absent or Val
  MISC_FEATURE (501)..(501): Absent or Ala or Val
  MISC_FEATURE (502)..(502): Absent or Ala
  MISC_FEATURE (503)..(503): Absent or Ala or Leu
  MISC_FEATURE (504)..(504): Absent or Phe
  MISC_FEATURE (505)..(505): Absent or Ala
  MISC_FEATURE (506)..(506): Absent or Glu or Asp
  MISC_FEATURE (507)..(507): Absent or Gly
  MISC_FEATURE (508)..(508): Absent or Ala or Pro
  MISC_FEATURE (509)..(509): Absent or Thr
  MISC_FEATURE (510)..(510): Absent or Val or Thr
  MISC_FEATURE (511)..(511): Absent or Met or Ile
  MISC_FEATURE (512)..(512): Absent or Asn or Arg
  MISC_FEATURE (513)..(513): Absent or Gly or Asp
  MISC_FEATURE (514)..(514): Absent or Leu or Val
  MISC_FEATURE (515)..(515): Absent or Glu or Ala
  MISC_FEATURE (516)..(516): Absent or Glu or Ser
  MISC_FEATURE (517)..(517): Absent or Leu or Trp
  MISC_FEATURE (518)..(518): Absent or Arg
  MISC_FEATURE (519)..(519): Absent or Val
  MISC_FEATURE (520)..(520): Absent or Lys
  MISC_FEATURE (521)..(521): Absent or Glu
  MISC_FEATURE (522)..(522): Absent or Ser or Thr
  MISC_FEATURE (523)..(523): Absent or Asp or Glu
  MISC_FEATURE (524)..(524): Absent or Arg or Glu
  MISC_FEATURE (525)..(525): Absent or Leu or Met
  MISC_FEATURE (526)..(526): Absent or Ser or Ile
  MISC_FEATURE (527)..(527): Absent or Ala
  MISC_FEATURE (528)..(528): Absent or Val or Ile
  MISC_FEATURE (529)..(529): Absent or Ala or Cys
  MISC_FEATURE (530)..(530): Absent or Asn or Thr
  MISC_FEATURE (531)..(531): Absent or Gly or Glu
  MISC_FEATURE (532)..(532): Absent or Leu
  MISC_FEATURE (533)..(533): Absent or Lys or Arg
  MISC_FEATURE (534)..(534): Absent or Leu or Lys
  MISC_FEATURE (535)..(535): Absent or Asn or Leu
  MISC_FEATURE (536)..(536): Absent or Gly
  MISC_FEATURE (537)..(537): Absent or Val or Ala
  MISC_FEATURE (538)..(538): Absent or Asp or Thr
  MISC_FEATURE (539)..(539): Absent or Cys or Val
  MISC_FEATURE (540)..(540): Absent or Asp or Glu
  MISC_FEATURE (541)..(541): Absent or Glu
  MISC_FEATURE (542)..(542): Absent or Gly
  MISC_FEATURE (543)..(543): Absent or Glu or Ser or Pro
  MISC_FEATURE (544)..(544): Absent or Thr or Asp
  MISC_FEATURE (545)..(545): Absent or Ser or Tyr
  MISC_FEATURE (546)..(546): Absent or Leu or Cys
  MISC_FEATURE (547)..(547): Absent or Val
  MISC_FEATURE (548)..(548): Absent or Val or Ile
  MISC_FEATURE (549)..(549): Absent or Arg or Thr
  MISC_FEATURE (550)..(550): Absent or Gly or Pro
  MISC_FEATURE (551)..(551): Absent or Arg or Pro
  MISC_FEATURE (552)..(552): Absent or Pro or Lys or Ala
  MISC_FEATURE (553)..(553): Absent or Asp
  MISC_FEATURE (554)..(554): Absent or Gly
  MISC_FEATURE (555)..(555): Absent or Lys
  MISC_FEATURE (556)..(556): Absent or Gly
  MISC_FEATURE (557)..(557): Absent or Leu
  MISC_FEATURE (558)..(558): Absent or Gly
  MISC_FEATURE (559)..(559): Absent or Asn or Lys
  MISC_FEATURE (560)..(560): Absent or Ala or Val or Leu
  MISC_FEATURE (561)..(561): Absent or Ser or Lys
  MISC_FEATURE (562)..(562): Absent or Gly or Thr or Pro or Val
  MISC_FEATURE (563)..(563): Absent or Ala
  MISC_FEATURE (564)..(564): Absent or Ala or Glu
  MISC_FEATURE (565)..(565): Absent or Val or Ile
  MISC_FEATURE (566)..(566): Absent or Ala or Asp
  MISC_FEATURE (567)..(567): Absent or Thr
  MISC_FEATURE (568)..(568): Absent or His or Tyr
  MISC_FEATURE (569)..(569): Absent or Leu or Asp
  MISC_FEATURE (570)..(570): Absent or Asp
  MISC_FEATURE (571)..(571): Absent or His
  MISC_FEATURE (572)..(572): Absent or Arg
  MISC_FEATURE (573)..(573): Absent or Ile or Met
  MISC_FEATURE (574)..(574): Absent or Ala or Pro
  MISC_FEATURE (575)..(575): Absent or Met
  MISC_FEATURE (576)..(576): Absent or Ser or Ala
  MISC_FEATURE (577)..(577): Absent or Phe
  MISC_FEATURE (578)..(578): Absent or Leu or Ser
  MISC_FEATURE (579)..(579): Absent or Val
  MISC_FEATURE (580)..(580): Absent or Met or Leu
  MISC_FEATURE (581)..(581): Absent or Gly or Ala
  MISC_FEATURE (582)..(582): Absent or Leu or Ala
  MISC_FEATURE (583)..(583): Absent or Val or Cys
  MISC_FEATURE (584)..(584): Absent or Ser or Ala
  MISC_FEATURE (585)..(585): Absent or Glu or Asp
  MISC_FEATURE (586)..(586): Absent or Asn or Val
  MISC_FEATURE (587)..(587): Absent or Pro
  MISC_FEATURE (588)..(588): Absent or Val or Ile
  MISC_FEATURE (589)..(589): Absent or Thr
  MISC_FEATURE (590)..(590): Absent or Val or Ile
  MISC_FEATURE (591)..(591): Absent or Asp or Asn or Lys
  MISC_FEATURE (592)..(592): Absent or Asp
  MISC_FEATURE (593)..(593): Absent or Ala or Ser or Pro
  MISC_FEATURE (594)..(594): Absent or Thr or Gly
  MISC_FEATURE (595)..(595): Absent or Met or Cys
  MISC_FEATURE (596)..(596): Absent or Ile or Thr
  MISC_FEATURE (597)..(597): Absent or Ala or Arg
  MISC_FEATURE (598)..(598): Absent or Thr or Lys
  MISC_FEATURE (599)..(599): Absent or Ser or Thr
  MISC_FEATURE (600)..(600): Absent or Phe
  MISC_FEATURE (601)..(601): Absent or Pro
  MISC_FEATURE (602)..(602): Absent or Glu or Asp
  MISC_FEATURE (603)..(603): Absent or Phe or Tyr
  MISC_FEATURE (604)..(604): Absent or Met or Phe
  MISC_FEATURE (605)..(605): Absent or Asp or Gln or Glu
  MISC_FEATURE (606)..(606): Absent or Leu or Val
  MISC_FEATURE (607)..(607): Absent or Met or Leu
  MISC_FEATURE (608)..(608): Absent or Ala or Glu
  MISC_FEATURE (609)..(609): Absent or Gly or Arg or Ser
  MISC_FEATURE (610)..(610): Absent or Leu or Ile
  MISC_FEATURE (611)..(611): Absent or Gly or Thr
  MISC_FEATURE (612)..(612): Absent or Ala or Lys
  MISC_FEATURE (613)..(613): Absent or Lys or His
  MISC_FEATURE (614)..(614): Absent or Ile
  MISC_FEATURE (615)..(615): Absent or Glu
  MISC_FEATURE (616)..(616): Absent or Leu
  MISC_FEATURE (617)..(617): Absent or Ser
  MISC_FEATURE (618)..(618): Absent or Asp
  MISC_FEATURE (619)..(619): Absent or Thr
  MISC_FEATURE (620)..(620): Absent or Lys
  MISC_FEATURE (621)..(621): Absent or Ala
  MISC_FEATURE (622)..(622): Absent or Ala
XXXXXXXXXXXXXXXXXXXXXXXXXXXXXXXXXXXXXXXXXXXXXXXXXXXXXXXXXXXXXXXXXXXXXXXXXMAQXSRICXGVQXXXXXISNLSKSXXXKSPXSXSLKTXQXXXXXXXXSSWGLKKSXXXLXXSXXRPXKVXXSVSTXXXXXXXXXXXXXXXXXXXXSGXXXXPGXKSXSXRXXXXXXLXXGXTXXXXLLXXXDXXXXXXAXXXXGXXXXXXXXXXXXXXXGXGGXXXXXXXXXXXXXXXXXXXXXXXXXXXXXXXXXXXXXXXXXXXXXXXXXXXXXXXXXXXXXXXXXXXXXXXXXXXXXXXXXXXXXXXXXXXXXXXXXXXXXXXXXXXXXXXXXXXXXXXXXXXXXXXXXXXXXXXXXXXXXXXXXXXXXXXXXXXXXXXXXXXXXXXXXXXXXXXXXXXXXXXXXXXXXXXXXXXXXXXXXXXXXXXXXXXXXXXXXXXXXXXXXXXXXXXXXXXXXXXXXXXXXXXXXXXXXXXXXXXXXXXXXXXXXXXXXXXXXXXXXXXXXXXXXXXXXXXXXXXXXXXXXXXXXXXXXXXXXXXXXXXXXXXXXXXXXXXXXXXXXXXXXXXXXXXXXXXXXXXXXXXXXXXXXXXXXXXXXXXXXXXXXX

SEQ ID NO: 17398 - protein, 136 aa, Artificial
  Consensus of seq id no. 229 and its homologs
  MISC_FEATURE (1)..(1): Absent or Met
  MISC_FEATURE (2)..(2): Absent or Ala
  MISC_FEATURE (3)..(3): Absent or Gln
  MISC_FEATURE (4)..(4): Absent or Val
  MISC_FEATURE (5)..(5): Absent or Ser
  MISC_FEATURE (6)..(6): Absent or Arg
  MISC_FEATURE (7)..(7): Absent or Ile
  MISC_FEATURE (8)..(8): Absent or Cys
  MISC_FEATURE (9)..(9): Absent or Asn
  MISC_FEATURE (10)..(10): Absent or Gly
  MISC_FEATURE (11)..(11): Absent or Val
  MISC_FEATURE (12)..(12): Absent or Gln
  MISC_FEATURE (13)..(13): Absent or Asn
  MISC_FEATURE (14)..(14): Absent or Pro
  MISC_FEATURE (15)..(15): Absent or Ser
  MISC_FEATURE (16)..(16): Absent or Leu
  MISC_FEATURE (17)..(17): Absent or Ile
  MISC_FEATURE (18)..(18): Absent or Ser
  MISC_FEATURE (19)..(19): Absent or Asn
  MISC_FEATURE (20)..(20): Absent or Leu
  MISC_FEATURE (21)..(21): Absent or Ser
  MISC_FEATURE (22)..(22): Absent or Lys
  MISC_FEATURE (23)..(23): Absent or Ser
  MISC_FEATURE (24)..(24): Absent or Ser
  MISC_FEATURE (25)..(25): Absent or Gln
  MISC_FEATURE (26)..(26): Absent or Arg
  MISC_FEATURE (27)..(27): Absent or Lys
  MISC_FEATURE (28)..(28): Absent or Ser
  MISC_FEATURE (29)..(29): Absent or Pro
  MISC_FEATURE (30)..(30): Absent or Leu
  MISC_FEATURE (31)..(31): Absent or Ser
  MISC_FEATURE (32)..(32): Absent or Val
  MISC_FEATURE (33)..(33): Absent or Ser
  MISC_FEATURE (34)..(34): Absent or Leu
  MISC_FEATURE (35)..(35): Absent or Lys
  MISC_FEATURE (36)..(36): Absent or Thr
  MISC_FEATURE (37)..(37): Absent or Gln
  MISC_FEATURE (38)..(38): Absent or Gln
  MISC_FEATURE (39)..(39): Absent or His
  MISC_FEATURE (40)..(40): Absent or Pro
  MISC_FEATURE (41)..(41): Absent or Arg
  MISC_FEATURE (42)..(42): Absent or Ala
  MISC_FEATURE (43)..(43): Absent or Tyr
  MISC_FEATURE (44)..(44): Absent or Pro
  MISC_FEATURE (45)..(45): Absent or Ile
  MISC_FEATURE (46)..(46): Absent or Ser
  MISC_FEATURE (47)..(47): Absent or Ser
  MISC_FEATURE (48)..(48): Absent or Ser
  MISC_FEATURE (49)..(49): Absent or Trp
  MISC_FEATURE (50)..(50): Absent or Gly
  MISC_FEATURE (51)..(51): Absent or Leu
  MISC_FEATURE (52)..(52): Absent or Lys
  MISC_FEATURE (53)..(53): Absent or Lys
  MISC_FEATURE (54)..(54): Absent or Ser
  MISC_FEATURE (55)..(55): Absent or Gly
  MISC_FEATURE (56)..(56): Absent or Met
  MISC_FEATURE (57)..(57): Absent or Thr
  MISC_FEATURE (58)..(58): Absent or Leu
  MISC_FEATURE (59)..(59): Absent or Ile
  MISC_FEATURE (60)..(60): Absent or Gly
  MISC_FEATURE (61)..(61): Absent or Ser
  MISC_FEATURE (62)..(62): Absent or Glu
  MISC_FEATURE (63)..(63): Absent or Leu
  MISC_FEATURE (64)..(64): Absent or Arg
  MISC_FEATURE (65)..(65): Absent or Pro
  MISC_FEATURE (66)..(66): Absent or Leu
  MISC_FEATURE (67)..(67): Absent or Lys
  MISC_FEATURE (68)..(68): Absent or Val
  MISC_FEATURE (69)..(69): Absent or Met
  MISC_FEATURE (70)..(70): Absent or Ser
  MISC_FEATURE (71)..(71): Absent or Ser
  MISC_FEATURE (72)..(72): Absent or Val
  MISC_FEATURE (73)..(73): Absent or Ser
  MISC_FEATURE (74)..(74): Absent or Thr
  MISC_FEATURE (75)..(75): Absent or Ala
  MISC_FEATURE (76)..(76): Absent or Cys
XXXXXXXXXXXXXXXXXXXXXXXXXXXXXXXXXXXXXXXXXXXXXXXXXXXXXXXXXXXXXXXXXXXXXXXXXXXXMPRDITSLYKKAGFEGDISRVASTTSPISRQQAWHSRRPTTARWSSARSRRRWCSSRGPS

SEQ ID NO: 17399 - protein, 637 aa, Artificial
  Consensus of seq id no. 234 and its homologs
  MISC_FEATURE (1)..(1): Absent or Lys
  MISC_FEATURE (2)..(2): Absent or Leu
  MISC_FEATURE (3)..(3): Absent or Pro
  MISC_FEATURE (4)..(4): Absent or Asn
  MISC_FEATURE (5)..(5): Absent or Arg or His
  MISC_FEATURE (6)..(6): Absent or Val or His or Met
  MISC_FEATURE (7)..(7): Absent or Arg or Pro or Glu or Asp or Ile or Lys
  MISC_FEATURE (8)..(8): Absent or His or Arg or Lys or Glu or Asn or Asp or Met
  MISC_FEATURE (9)..(9): Absent or Arg or Ser or Thr or Ile or Gly or Glu
  MISC_FEATURE (10)..(10): Absent or Phe or Ala or Thr or Ile or Met or Val or Ser
  MISC_FEATURE (11)..(11): Absent or Leu or Met or Ser or Ala or Val or Phe or Tyr or Glu
  MISC_FEATURE (12)..(12): Absent or Ser or Thr or Asp or Glu or Ala or Val or Phe or Leu or Asn or Lys
  MISC_FEATURE (13)..(13): Absent or Pro or Ala or Arg or Met or Phe or Gly or Asp
  MISC_FEATURE (14)..(14): Absent or Ser or Gly or Thr or Asp or Ala or Glu or Lys or Val or Ile or Met or Leu
  MISC_FEATURE (15)..(15): Absent or Ser or Ile or Lys or Thr or Asn or Arg or Ala or Leu or Asp
  MISC_FEATURE (16)..(16): Absent or Ala or Arg or His or Asp or Glu or Lys or Gly or Asn
  MISC_FEATURE (17)..(17): Absent or Ala or Thr or Tyr or Gly or Glu or Lys or Arg
  MISC_FEATURE (18)..(18): Absent or Pro or Arg or Tyr or Gly or Thr or Gln or Ser or Ile
  MISC_FEATURE (19)..(19): Absent or Val or Tyr or Phe or Leu or His or Gln or Ser
  MISC_FEATURE (20)..(20): Absent or Pro or Cys or Met or Leu or Gly or Asn or Gln or His or Asp
  MISC_FEATURE (21)..(21): Absent or Ser or Ala or Asp or Thr or Pro or Gly or Gln or Phe or Cys
  MISC_FEATURE (22)..(22): Absent or Pro or Leu or Glu or Gly or Asp or Ser or Asn or His or Gln
  MISC_FEATURE (23)..(23): Absent or Pro or Arg or Lys or Thr or Gln or Ala or His or Cys
  MISC_FEATURE (24)..(24): Absent or Arg or Ser or His or Pro or Phe or Leu or Thr
  MISC_FEATURE (25)..(25): Absent or Pro or Leu or Ala or Ser or Tyr or His or Cys or Gln
  MISC_FEATURE (26)..(26): Absent or Lys or Pro or Leu or Met or Ser
  MISC_FEATURE (27)..(27): Absent or Gln or Pro or Ser or Leu or Asp or Arg or Val
  MISC_FEATURE (28)..(28): Absent or Trp or Leu or Pro or Ile or Met or Thr or Arg or Ser or Phe or Tyr
  MISC_FEATURE (29)..(29): Absent or Ala or Pro or Ser or Val or Glu or Phe or Asp or Thr
  MISC_FEATURE (30)..(30): Absent or Ser or Ile or Pro or Arg or Gly or Asn or Phe or Tyr or Leu or Cys
  MISC_FEATURE (31)..(31): Met or Ser or Leu or Val or Ile or Absent or Ala or Thr
  MISC_FEATURE (32)..(32): Ser or Leu or Trp or Gln or Ile or Ala or Absent or Pro or Thr or Tyr or Cys or Val
  MISC_FEATURE (33)..(33): Gln or Pro or Asn or Arg or Ser or Absent or Asp or Glu or Ala
  MISC_FEATURE (34)..(34): Ala or Ser or Arg or Asp or Thr or Absent or Gly
  MISC_FEATURE (35)..(35): Absent or Ser or Tyr or Cys
  MISC_FEATURE (36)..(36): Absent or Cys or Tyr or Pro or Ser
  MISC_FEATURE (37)..(37): Absent or Val or Ser or Gln or Pro
  MISC_FEATURE (38)..(38): Absent or Ala or Thr
  MISC_FEATURE (39)..(39): Absent or Gln
  MISC_FEATURE (40)..(40): Absent or Thr
  MISC_FEATURE (41)..(41): Absent or Arg
  MISC_FEATURE (42)..(42): Absent or Arg
  MISC_FEATURE (43)..(43): Absent or Val
  MISC_FEATURE (44)..(44): Absent or Thr
  MISC_FEATURE (45)..(45): Absent or Leu
  MISC_FEATURE (46)..(46): Absent or Trp or Tyr
  MISC_FEATURE (47)..(47): Absent or Leu
  MISC_FEATURE (48)..(48): Absent or Thr or Ser or Arg
  MISC_FEATURE (49)..(49): Absent or Ser or Thr
  MISC_FEATURE (50)..(50): Absent or Arg or Tyr or Cys or Asn
  MISC_FEATURE (51)..(51): Absent or Gly or Ser or Tyr or Val
  MISC_FEATURE (52)..(52): Absent or Arg or Ser
  MISC_FEATURE (53)..(53): Absent or Arg or Gly or Ala or Val or Ile or Ser
  MISC_FEATURE (54)..(54): Absent or Ala or Lys or Gln or Met or His or Leu
  MISC_FEATURE (55)..(55): Absent or Arg or Asp or Glu or Ala
  MISC_FEATURE (56)..(56): Asp or Ile or Ala or Absent or Val or His
  MISC_FEATURE (57)..(57): Ile or Val or Ala or Ser or Absent or Glu or Thr
  MISC_FEATURE (58)..(58): Ser or Asp or Pro or Leu or Thr or Absent or Lys or Asn or Cys or His
  MISC_FEATURE (63)..(63): Absent or Pro or Cys or Val
  MISC_FEATURE (64)..(64): Absent or Arg or Leu
  MISC_FEATURE (65)..(65): Absent or Ala or Cys
  MISC_FEATURE (66)..(66): Absent or Thr or Lys
  MISC_FEATURE (67)..(67): Absent or Ile or Thr
  MISC_FEATURE (68)..(68): Absent or Asp
  MISC_FEATURE (69)..(69): Absent or Asn
  MISC_FEATURE (70)..(70): Absent or Phe
  MISC_FEATURE (71)..(71): Absent or Ser
  MISC_FEATURE (72)..(72): Absent or Ser
  MISC_FEATURE (73)..(73): Absent or Thr
  MISC_FEATURE (74)..(74): Absent or Ser
  MISC_FEATURE (75)..(75): Absent or Ile
  MISC_FEATURE (76)..(76): Absent or His
  MISC_FEATURE (77)..(77): Absent or His
  MISC_FEATURE (78)..(78): Absent or Thr
  MISC_FEATURE (79)..(79): Absent or His
  MISC_FEATURE (80)..(80): Absent or Ala
  MISC_FEATURE (81)..(81): Absent or Arg
  MISC_FEATURE (82)..(82): Absent or Ser
  MISC_FEATURE (83)..(83): Absent or Leu
  MISC_FEATURE (84)..(84): Absent or His
  MISC_FEATURE (85)..(85): Absent or Leu
  MISC_FEATURE (86)..(86): Absent or Lys
  MISC_FEATURE (87)..(87): Absent or Leu
  MISC_FEATURE (88)..(88): Absent or Pro
  MISC_FEATURE (89)..(89): Absent or Gly
  MISC_FEATURE (90)..(90): Absent or Val
  MISC_FEATURE (91)..(91): Absent or Phe
  MISC_FEATURE (92)..(92): Absent or Pro
  MISC_FEATURE (93)..(93): Absent or Gly
  MISC_FEATURE (94)..(94): Absent or Trp
  MISC_FEATURE (95)..(95): Absent or Arg
  MISC_FEATURE (96)..(96): Absent or His
  MISC_FEATURE (97)..(97): Absent or Val
  MISC_FEATURE (98)..(98): Absent or Cys
  MISC_FEATURE (99)..(99): Absent or His
  MISC_FEATURE (100)..(100): Absent or Ser
  MISC_FEATURE (101)..(101): Absent or Thr
  MISC_FEATURE (102)..(102): Absent or His
  MISC_FEATURE (103)..(103): Absent or Arg or Gly or Thr
  MISC_FEATURE (104)..(104): Ser or Phe or Ala or Arg or Absent or Tyr or His or Ile or Thr
  MISC_FEATURE (108)..(108): Pro or Arg or Asp or Absent or Ala or Glu or Gln
  MISC_FEATURE (112)..(112): Thr or Ser or Pro or Arg or Absent or Cys or Asn
  MISC_FEATURE (115)..(115): Asn or Val or Asp or Ala or Absent or Thr or Ser
  MISC_FEATURE (117)..(117): Absent or Ser or Asn or Asp or any naturally occurring amino acid or Ile
  MISC_FEATURE (119)..(119): Absent or Gly or Ala or Glu or Ser or Lys or Cys or Pro
  MISC_FEATURE (120)..(120): Absent or Ser or Gly or Asn or Thr or Asp or Val
  MISC_FEATURE (121)..(121): Absent or Cys or Ile or Met
  MISC_FEATURE (122)..(122): Absent or Gly or Val
  MISC_FEATURE (123)..(123): Absent or Tyr or Gly or Val
  MISC_FEATURE (124)..(124): Absent or Ala
  MISC_FEATURE (125)..(125): Absent or Leu
  MISC_FEATURE (126)..(126): Absent or Asn
  MISC_FEATURE (127)..(127): Absent or Leu
  MISC_FEATURE (128)..(128): Absent or Ser
  MISC_FEATURE (129)..(129): Absent or Ser
  MISC_FEATURE (130)..(130): Absent or Ser
  MISC_FEATURE (131)..(131): Absent or Asn
  MISC_FEATURE (132)..(132): Absent or Arg
  MISC_FEATURE (133)..(133): Ile or Ser or Absent
  MISC_FEATURE (134)..(134): Thr or Cys or Absent
  MISC_FEATURE (135)..(135): Ser or Gly or Absent
  MISC_FEATURE (136)..(136): Asn or Glu or Ser or Asp or Gly or Ala or Absent
  MISC_FEATURE (137)..(137): Ile or Val or Cys or Gly or Ala or Absent or Leu
  MISC_FEATURE (139)..(139): Ser or Absent or Tyr or Ala or Gly or Pro or Asp or Val
  MISC_FEATURE (140)..(140): Glu or Ser or Ala or Gly or Absent or Lys or Asn
  MISC_FEATURE (142)..(142): Gln or Lys or Asn or Arg or Gly or Absent or Ser or Glu
  MISC_FEATURE (144)..(144): Ser or Absent or Gly or His or Gln or any naturally occurring amino acid or Asn
  MISC_FEATURE (145)..(145): Val or Leu or Absent or Ile or Ala or Cys or Trp or Met
  MISC_FEATURE (146)..(146): Absent or Ala or Val or Arg
  MISC_FEATURE (147)..(147): Lys or Absent or Arg or Gly or Ser
  MISC_FEATURE (148)..(148): Lys or Absent or Arg or Ala or Ser or Thr
  MISC_FEATURE (150)..(150): Ser or Leu or Absent or Val or Glu or Ile or Lys
  MISC_FEATURE (151)..(151): Leu or Ile or Absent or Val
  MISC_FEATURE (152)..(152): Ser or Absent or Ala or Val or Arg
  MISC_FEATURE (154)..(154): Ala or Ile or Ser or Thr or Leu or Asp or Gly or Phe or Val
  MISC_FEATURE (155)..(155): Ser or Ala or Asn or Phe or Gln
  MISC_FEATURE (156)..(156): Val or Ser or Ile
  MISC_FEATURE (158)..(158): Leu or Arg or Asp or Glu
  MISC_FEATURE (159)..(159): Ser or Ala or Thr or Gly
  MISC_FEATURE (163)..(163): Gln or Asp or His or Leu or Arg
  MISC_FEATURE (164)..(164): Ile or Val or Ala or Leu or Thr
  MISC_FEATURE (167)..(167): Ile or Val or Leu or Phe or Absent
  MISC_FEATURE (168)..(168): Asn or Ser or Glu or His or Arg or Absent or Thr or Gln or Lys
  MISC_FEATURE (170)..(170): Absent or Leu or Pro
  MISC_FEATURE (171)..(171): Absent or Pro or Ser
  MISC_FEATURE (172)..(172): Absent or Leu or Trp
  MISC_FEATURE (173)..(173): Absent or Pro
  MISC_FEATURE (174)..(174): Absent or Trp
  MISC_FEATURE (175)..(175): Absent or Gly
  MISC_FEATURE (176)..(176): Absent or Gly
  MISC_FEATURE (177)..(177): Absent or His
  MISC_FEATURE (178)..(178): Absent or Arg
  MISC_FEATURE (179)..(179): Absent or Ser
  MISC_FEATURE (180)..(180): Absent or Lys
  MISC_FEATURE (181)..(181): Absent or Thr
  MISC_FEATURE (182)..(182): Absent or Lys
  MISC_FEATURE (183)..(183): Absent or Leu
  MISC_FEATURE (184)..(184): Absent or Leu
  MISC_FEATURE (185)..(185): Absent or Cys
  MISC_FEATURE (186)..(186): Absent or Arg
  MISC_FEATURE (187)..(187): Absent or Lys
  MISC_FEATURE (188)..(188): Absent or Cys
  MISC_FEATURE (189)..(189): Absent or Gly
  MISC_FEATURE (190)..(190): Absent or Val
  MISC_FEATURE (191)..(191): Absent or Leu
  MISC_FEATURE (192)..(192): Absent or Ile
  MISC_FEATURE (193)..(193): Absent or Gly
  MISC_FEATURE (194)..(194): Absent or Tyr
  MISC_FEATURE (195)..(195): Absent or Gly
  MISC_FEATURE (196)..(196): Absent or Tyr
  MISC_FEATURE (197)..(197): Absent or Gly
  MISC_FEATURE (198)..(198): Absent or Asp
  MISC_FEATURE (199)..(199): Absent or Ser
  MISC_FEATURE (200)..(200): Absent or Pro
  MISC_FEATURE (201)..(201): Absent or Ala
  MISC_FEATURE (202)..(202): Absent or Leu
  MISC_FEATURE (203)..(203): Absent or Cys
  MISC_FEATURE (204)..(204): Absent or Gly
  MISC_FEATURE (205)..(205): Absent or Phe
  MISC_FEATURE (206)..(206): Absent or Asp
  MISC_FEATURE (207)..(207): Absent or Leu
  MISC_FEATURE (208)..(208): Absent or Ala
  MISC_FEATURE (209)..(209): Absent or Asn
  MISC_FEATURE (210)..(210): Absent or Ser
  MISC_FEATURE (211)..(211): Absent or Ser
  MISC_FEATURE (212)..(212): Absent or Asn
  MISC_FEATURE (213)..(213): Absent or Ser
  MISC_FEATURE (214)..(214): Absent or Ala
  MISC_FEATURE (215)..(215): Absent or Cys
  MISC_FEATURE (216)..(216): Absent or Glu
  MISC_FEATURE (217)..(217): Absent or Lys
  MISC_FEATURE (218)..(218): Absent or Ser
  MISC_FEATURE (219)..(219): Absent or Glu
  MISC_FEATURE (220)..(220): Absent or Leu
  MISC_FEATURE (221)..(221): Absent or Tyr
  MISC_FEATURE (222)..(222): Absent or Asn
  MISC_FEATURE (223)..(223): Absent or Leu
  MISC_FEATURE (224)..(224): Absent or Gln
  MISC_FEATURE (225)..(225): Absent or Lys
  MISC_FEATURE (226)..(226): Absent or Ser
  MISC_FEATURE (227)..(227): Absent or Ala
  MISC_FEATURE (228)..(228): Absent or Asn
  MISC_FEATURE (229)..(229): Absent or Lys
  MISC_FEATURE (230)..(230): Absent or Ile
  MISC_FEATURE (231)..(231): Absent or Asn
  MISC_FEATURE (232)..(232): Absent or Met
  MISC_FEATURE (233)..(233): Absent or Glu
  MISC_FEATURE (234)..(234): Absent or Gly
  MISC_FEATURE (235)..(235): Absent or Pro
  MISC_FEATURE (236)..(236): Absent or Ser
  MISC_FEATURE (237)..(237): Absent or Arg
  MISC_FEATURE (238)..(238): Absent or Tyr
  MISC_FEATURE (239)..(239): Absent or Tyr
  MISC_FEATURE (240)..(240): Absent or Leu
  MISC_FEATURE (241)..(241): Absent or Thr
  MISC_FEATURE (242)..(242): Absent or Ser
  MISC_FEATURE (243)..(243): Absent or Ile
  MISC_FEATURE (244)..(244): Absent or Lys
  MISC_FEATURE (245)..(245): Absent or Asp
  MISC_FEATURE (246)..(246): Absent or Leu
  MISC_FEATURE (247)..(247): Absent or Pro
  MISC_FEATURE (248)..(248): Absent or Glu
  MISC_FEATURE (249)..(249): Absent or Asp
  MISC_FEATURE (250)..(250): Absent or Cys
  MISC_FEATURE (251)..(251): Absent or Leu
  MISC_FEATURE (252)..(252): Absent or Asn
  MISC_FEATURE (253)..(253): Absent or Phe
  MISC_FEATURE (254)..(254): Absent or Ile
  MISC_FEATURE (255)..(255): Absent or Phe
  MISC_FEATURE (256)..(256): Absent or Gln
  MISC_FEATURE (257)..(257): Absent or Arg
  MISC_FEATURE (258)..(258): Absent or Leu
  MISC_FEATURE (259)..(259): Absent or Asp
  MISC_FEATURE (260)..(260): Absent or Ser or Cys
  MISC_FEATURE (261)..(261): Absent or Gly or Asn
  MISC_FEATURE (262)..(262): Absent or Ser
  MISC_FEATURE (263)..(263): Absent or Glu or Asp
  MISC_FEATURE (264)..(264): Absent or Arg
  MISC_FEATURE (265)..(265): Absent or Ser or Glu
  MISC_FEATURE (266)..(266): Absent or Ala or Ser
  MISC_FEATURE (267)..(267): Absent or Phe
  MISC_FEATURE (268)..(268): Absent or Gly
  MISC_FEATURE (269)..(269): Absent or Leu
  MISC_FEATURE (270)..(270): Absent or Thr
  MISC_FEATURE (271)..(271): Absent or Cys
  MISC_FEATURE (272)..(272): Absent or Lys or His
  MISC_FEATURE (273)..(273): Absent or Asn or His
  MISC_FEATURE (274)..(274): Absent or Trp
  MISC_FEATURE (275)..(275): Absent or Phe or Leu
  MISC_FEATURE (276)..(276): Absent or Lys or Arg
  MISC_FEATURE (277)..(277): Absent or Val or Ile
  MISC_FEATURE (278)..(278): Absent or Arg or Gln
  MISC_FEATURE (279)..(279): Absent or Asn
  MISC_FEATURE (280)..(280): Absent or Leu or Ile
  MISC_FEATURE (281)..(281): Absent or Gly or Asn
  MISC_FEATURE (282)..(282): Absent or Arg
  MISC_FEATURE (283)..(283): Absent or Lys or Arg
  MISC_FEATURE (284)..(284): Absent or Ser or Phe
  MISC_FEATURE (285)..(285): Absent or Leu
  MISC_FEATURE (286)..(286): Absent or Thr or Gln
  MISC_FEATURE (287)..(287): Absent or Phe
  MISC_FEATURE (288)..(288): Absent or His or Gln
  MISC_FEATURE (289)..(289): Absent or Cys
  MISC_FEATURE (290)..(290): Absent or Ser
  MISC_FEATURE (291)..(291): Absent or Phe
  MISC_FEATURE (292)..(292): Absent or Asn or Thr
  MISC_FEATURE (293)..(293): Absent or Pro or Gln
  MISC_FEATURE (294)..(294): Absent or Ala or Leu
  MISC_FEATURE (295)..(295): Absent or Ile or Asp
  MISC_FEATURE (296)..(296): Absent or Asp or Ile
  MISC_FEATURE (297)..(297): Absent or Lys or Ser
  MISC_FEATURE (298)..(298): Absent or Glu or Ser
  MISC_FEATURE (299)..(299): Absent or His or Leu
  MISC_FEATURE (300)..(300): Absent or Ala or Ser
  MISC_FEATURE (301)..(301): Absent or Lys or Gln
  MISC_FEATURE (302)..(302): Absent or Cys or Thr
  MISC_FEATURE (303)..(303): Absent or Ile or Ser
  MISC_FEATURE (304)..(304): Absent or Pro
  MISC_FEATURE (305)..(305): Absent or Thr
  MISC_FEATURE (306)..(306): Absent or Ile
  MISC_FEATURE (307)..(307): Absent or Ser
  MISC_FEATURE (308)..(308): Absent or Ser
  MISC_FEATURE (309)..(309): Absent or Phe
  MISC_FEATURE (310)..(310): Absent or His
  MISC_FEATURE (311)..(311): Absent or Leu
  MISC_FEATURE (312)..(312): Absent or Asn
  MISC_FEATURE (313)..(313): Absent or Lys or Arg
  MISC_FEATURE (314)..(314): Absent or Ile or Leu or Thr or Met or Ala or Val or Phe
  MISC_FEATURE (315)..(315): Absent or Leu or Pro
  MISC_FEATURE (316)..(316): Absent or Ala or Thr or any naturally occurring amino acid or Phe or Tyr or Arg or His
  MISC_FEATURE (317)..(317): Cys or His or Arg or Absent or Phe or Val or Leu
  MISC_FEATURE (318)..(318): Phe or Ser or Val or Leu or Arg or Absent or His or Ile or Asp or Asn
  MISC_FEATURE (319)..(319): Pro or Gln or Asp or Ser or Absent
  MISC_FEATURE (320)..(320): Absent or Phe or Cys or Leu or Val or Ser or Arg or Ala or Lys or Met
  MISC_FEATURE (321)..(321): Val or Leu or Arg or Absent or Trp or Tyr or Asn or His or Cys
  MISC_FEATURE (322)..(322): Ser or Thr or Asn or Glu or Ala or Absent or Lys
  MISC_FEATURE (324)..(324): Phe or Arg or Ile or Leu or Gly or Absent
  MISC_FEATURE (325)..(325): Asn or Gly or Ser or Leu or Pro or Phe or Absent
  MISC_FEATURE (328)..(328): Ser or Pro or Gly or Arg or Asn or Lys or His or Gln
  MISC_FEATURE (331)..(331): Lys or Glu or Arg or Ala
  MISC_FEATURE (333)..(333): Absent or Pro
  MISC_FEATURE (334)..(334): Absent or Asp
  MISC_FEATURE (335)..(335): Absent or Ser
  MISC_FEATURE (336)..(336): Absent or Ala or Gly
  MISC_FEATURE (337)..(337): Absent or Leu
  MISC_FEATURE (338)..(338): Absent or Ser or Thr
  MISC_FEATURE (339)..(339): Absent or Thr or Pro
  MISC_FEATURE (340)..(340): Absent or Leu
  MISC_FEATURE (341)..(341): Absent or Arg or Gln
  MISC_FEATURE (342)..(342): Absent or Val or Asp
  MISC_FEATURE (343)..(343): Absent or Ser or Tyr
  MISC_FEATURE (344)..(344): Absent or Gly
  MISC_FEATURE (345)..(345): Absent or Ser
  MISC_FEATURE (346)..(346): Absent or Ser or Arg
  MISC_FEATURE (347)..(347): Absent or Leu
  MISC_FEATURE (348)..(348): Absent or Lys or Gln
  MISC_FEATURE (349)..(349): Absent or Ser or Thr
  MISC_FEATURE (350)..(350): Absent or Phe or Ile
  MISC_FEATURE (351)..(351): Absent or Ser or Phe
  MISC_FEATURE (352)..(352): Absent or Leu
  MISC_FEATURE (353)..(353): Absent or Tyr or Asp
  MISC_FEATURE (354)..(354): Absent or Cys
  MISC_FEATURE (355)..(355): Absent or Cys
  MISC_FEATURE (356)..(356): Absent or Ser or Phe
  MISC_FEATURE (357)..(357): Absent or Gly
  MISC_FEATURE (358)..(358): Absent or Ile
  MISC_FEATURE (359)..(359): Absent or Thr
  MISC_FEATURE (360)..(360): Absent or Asp
  MISC_FEATURE (361)..(361): Absent or Asp or Gln
  MISC_FEATURE (362)..(362): Absent or Gly
  MISC_FEATURE (363)..(363): Absent or Leu
  MISC_FEATURE (364)..(364): Absent or Ala or Ser
  MISC_FEATURE (365)..(365): Absent or Gln or Leu
  MISC_FEATURE (366)..(366): Absent or Val or Ile
  MISC_FEATURE (367)..(367): Absent or Ala
  MISC_FEATURE (368)..(368): Absent or Ile or Thr
  MISC_FEATURE (369)..(369): Absent or Gly
  MISC_FEATURE (370)..(370): Absent or Cys
  MISC_FEATURE (371)..(371): Absent or Pro
  MISC_FEATURE (372)..(372): Absent or Asn
  MISC_FEATURE (373)..(373): Absent or Leu
  MISC_FEATURE (374)..(374): Absent or Val or Thr
  MISC_FEATURE (375)..(375): Absent or Val
  MISC_FEATURE (376)..(376): Absent or Val or Ile
  MISC_FEATURE (377)..(377): Absent or Glu or Ser
  MISC_FEATURE (378)..(378): Absent or Leu
  MISC_FEATURE (379)..(379): Absent or Gln or Tyr
  MISC_FEATURE (380)..(380): Absent or Ser or Arg
  MISC_FEATURE (381)..(381): Absent or Cys
  MISC_FEATURE (382)..(382): Absent or Phe or Asn
  MISC_FEATURE (383)..(383): Absent or Asn
  MISC_FEATURE (384)..(384): Absent or Ile
  MISC_FEATURE (385)..(385): Absent or Thr
  MISC_FEATURE (386)..(386): Absent or Asp
  MISC_FEATURE (387)..(387): Absent or Ala or Val
  MISC_FEATURE (388)..(388): Absent or Ala or Gly
  MISC_FEATURE (389)..(389): Absent or Leu
  MISC_FEATURE (390)..(390): Absent or Glu or Gln
  MISC_FEATURE (391)..(391): Absent or Ser or Asn
  MISC_FEATURE (398)..(398): Absent or Gly or Ala
  MISC_FEATURE (399)..(399): Absent or Leu
  MISC_FEATURE (400)..(400): Absent or Lys
  MISC_FEATURE (401)..(401): Absent or Ser or Asp
  MISC_FEATURE (402)..(402): Absent or Leu or Val
  MISC_FEATURE (403)..(403): Absent or Asn
  MISC_FEATURE (404)..(404): Absent or Leu
  MISC_FEATURE (405)..(405): Absent or Gly or Ser
  MISC_FEATURE (406)..(406): Absent or Ser or Tyr
  MISC_FEATURE (407)..(407): Absent or Cys
  MISC_FEATURE (408)..(408): Absent or Met or Ala
  MISC_FEATURE (409)..(409): Absent or Gly or Leu
  MISC_FEATURE (410)..(410): Absent or Ile
  MISC_FEATURE (411)..(411): Absent or Thr or Ser
  MISC_FEATURE (412)..(412): Absent or Asp
  MISC_FEATURE (413)..(413): Absent or Gln or His
  MISC_FEATURE (414)..(414): Absent or Gly
  MISC_FEATURE (415)..(415): Absent or Val or Ile
  MISC_FEATURE (416)..(416): Absent or Ser or Arg
  MISC_FEATURE (417)..(417): Absent or Ala
  MISC_FEATURE (418)..(418): Absent or Ile or Leu
  MISC_FEATURE (419)..(419): Absent or Phe or Ser
  MISC_FEATURE (420)..(420): Absent or Ser or Gln
  MISC_FEATURE (421)..(421): Absent or Asn or Lys
  MISC_FEATURE (422)..(422): Absent or Cys
  MISC_FEATURE (423)..(423): Absent or Pro or Cys
  MISC_FEATURE (424)..(424): Absent or Asn or Gln
  MISC_FEATURE (425)..(425): Absent or Ile or Leu
  MISC_FEATURE (426)..(426): Absent or Cys or Arg
  MISC_FEATURE (427)..(427): Absent or Thr or Ala
  MISC_FEATURE (428)..(428): Absent or Leu or Val
  MISC_FEATURE (429)..(429): Absent or Ile or Ser
  MISC_FEATURE (430)..(430): Absent or Val or Ile
  MISC_FEATURE (431)..(431): Absent or Thr or Ser
  MISC_FEATURE (432)..(432): Absent or Gly or Phe
  MISC_FEATURE (433)..(433): Absent or Cys
  MISC_FEATURE (434)..(434): Absent or Arg or Lys
  MISC_FEATURE (435)..(435): Absent or Arg or Gly
  MISC_FEATURE (436)..(436): Absent or Leu or Val
  MISC_FEATURE (437)..(437): Val or Ala or Ser or Gly or Asn
  MISC_FEATURE (438)..(438): His or Ser or Gly or Arg or any naturally occurring amino acid or Tyr
  MISC_FEATURE (439)..(439): Ile or Ala or Val or Leu or Thr
  MISC_FEATURE (441)..(441): Tyr or Phe or His or Asn or Ser or Ala or Ile
  MISC_FEATURE (442)..(442): Gly or Absent or any naturally occurring amino acid or Arg or Ser or Ala
  MISC_FEATURE (444)..(444): Gly or Tyr or Thr or Cys or Asp or Glu or Absent or Gln or Ala or Asn or Lys
  MISC_FEATURE (445)..(445): Gly or Val or Ser or Asp or Glu or Lys or Tyr or Absent or Leu or Thr
  MISC_FEATURE (446)..(446): Glu or Gly or Ser or Pro or Arg or Thr or Asn or Lys or Asp or Absent or Val or Tyr
  MISC_FEATURE (447)..(447): Ser or Pro or Gln or Thr or Gly or Absent or Asp or Glu or Ala or Arg or Asn
  MISC_FEATURE (448)..(448): Absent or Phe or Leu or Pro or Ser or Asp or Glu or Lys or Gln or Thr or Arg
  MISC_FEATURE (449)..(449): Absent or Arg or Ala or Thr or Glu or Asp or Pro or Gly or Ser
  MISC_FEATURE (450)..(450): Absent or Tyr or Leu or Arg or Glu or Pro or Phe or Gln or Ser
  MISC_FEATURE (451)..(451): Absent or Phe or Leu or Arg or Tyr or Asp or Ala or Ser
  MISC_FEATURE (452)..(452): Absent or Ala
  MISC_FEATURE (453)..(453): Absent or Arg
  MISC_FEATURE (454)..(454): Absent or Asp or Pro or Ala
  MISC_FEATURE (455)..(455): Absent or Ala or Ser
  MISC_FEATURE (456)..(456): Absent or Gly or Ser or Ala
  MISC_FEATURE (457)..(457): Absent or Ser or Leu
  MISC_FEATURE (458)..(458): Absent or Ser or Pro
  MISC_FEATURE (459)..(459): Absent or Ser or Ala
  MISC_FEATURE (460)..(460): Absent or Leu or Cys
  MISC_FEATURE (461)..(461): Absent or Phe or Leu or Gly or Asp
  MISC_FEATURE (462)..(462): Absent or Gly
  MISC_FEATURE (463)..(463): Absent or Asp or Gly or Ser or Pro or Tyr or Phe
  MISC_FEATURE (464)..(464): Absent or Glu or Asp or Ala or Pro
  MISC_FEATURE (465)..(465): His or Ala or Leu or Pro or Absent or Gly or Asp or Phe
  MISC_FEATURE (466)..(466): Val or Ala or Glu or Absent or Pro or Gly or Ser or Asp
  MISC_FEATURE (467)..(467): Leu or Ser or Gln or Ala or Thr or any naturally occurring amino acid or Absent or Asp
  MISC_FEATURE (468)..(468): Cys or Asp or Ala or Thr or Absent or Gln or Asn or Arg
  MISC_FEATURE (469)..(469): Gly or Ser or Met or Lys or Ala or Arg or Asp or Absent or Asn or Glu or Leu
  MISC_FEATURE (470)..(470): Phe or Leu or Ala or Asp or Thr or Ser or Absent or Gly
  MISC_FEATURE (471)..(471): Glu or Asp or Ser or Gly or Arg or Pro or Absent or His or Asn or Lys
  MISC_FEATURE (472)..(472): Ser or Pro or Met or Absent or Thr or Cys or Leu
  MISC_FEATURE (473)..(473): Absent or Asp or Glu or Ser or Thr or Ala or Arg
  MISC_FEATURE (474)..(474): Absent or Gly or Ser or Pro
  MISC_FEATURE (475)..(475): Absent or Leu or Ile or Gly or Ser or Ala or Asp
  MISC_FEATURE (476)..(476): Absent or Leu or Thr
  MISC_FEATURE (477)..(477): Absent or Asp or Glu
  MISC_FEATURE (478)..(478): Absent or Ile
  MISC_FEATURE (479)..(479): Absent or Ala or Val
  MISC_FEATURE (480)..(480): Absent or Ser
  MISC_FEATURE (481)..(481): Absent or Gly
  MISC_FEATURE (482)..(482): Absent or Ser or Gly
  MISC_FEATURE (483)..(483): Absent or Gly
  MISC_FEATURE (484)..(484): Absent or Leu
  MISC_FEATURE (485)..(485): Absent or Lys or Glu
  MISC_FEATURE (486)..(486): Absent or Tyr
  MISC_FEATURE (487)..(487): Absent or Leu
  MISC_FEATURE (488)..(488): Absent or Asn
  MISC_FEATURE (489)..(489): Absent or Leu or Val
  MISC_FEATURE (490)..(490): Absent or Gln or Ser
  MISC_FEATURE (491)..(491): Absent or Lys or Asn
  MISC_FEATURE (492)..(492): Absent or Leu
  MISC_FEATURE (493)..(493): Absent or Arg
  MISC_FEATURE (494)..(494): Absent or Ser or Trp
  MISC_FEATURE (495)..(495): Absent or Ser or Cys
  MISC_FEATURE (496)..(496): Absent or Thr or Ile
  MISC_FEATURE (497)..(497): Absent or Gly or Thr
  MISC_FEATURE (498)..(498): Absent or Leu or Gly
  MISC_FEATURE (499)..(499): Absent or Asp
  MISC_FEATURE (500)..(500): Absent or Gly
  MISC_FEATURE (501)..(501): Absent or Leu
  MISC_FEATURE (502)..(502): Absent or Gly or Ala
  MISC_FEATURE (503)..(503): Absent or Asn or Ala
  MISC_FEATURE (504)..(504): Absent or Leu or Ile
  MISC_FEATURE (505)..(505): Absent or Gly
  MISC_FEATURE (506)..(506): Absent or Ala
  MISC_FEATURE (507)..(507): Absent or Ala or Gly
  MISC_FEATURE (508)..(508): Absent or Leu
  MISC_FEATURE (509)..(509): Absent or Ala or Gly
  MISC_FEATURE (510)..(510): Absent or Lys or Thr
  MISC_FEATURE (511)..(511): Absent or Ser or Lys
  MISC_FEATURE (512)..(512): Absent or Leu
  MISC_FEATURE (513)..(513): Absent or Cys or Arg
  MISC_FEATURE (514)..(514): Absent or Ile or Val
  MISC_FEATURE (515)..(515): Absent or Leu
  MISC_FEATURE (516)..(516): Absent or Asn
  MISC_FEATURE (517)..(517): Absent or Leu
  MISC_FEATURE (518)..(518): Absent or Arg
  MISC_FEATURE (519)..(519): Absent or Met
  MISC_FEATURE (520)..(520): Absent or Cys or Gly
  MISC_FEATURE (521)..(521): Absent or Arg
  MISC_FEATURE (522)..(522): Absent or Tyr or Leu
  MISC_FEATURE (523)..(523): Absent or Leu or Val or Ser or Pro
  MISC_FEATURE (524)..(524): Absent or Thr or Ser or Gly or Arg or Val or Ala or Pro or Ile
  MISC_FEATURE (525)..(525): Absent or Ala or Asp or Ser or Arg or Gly or Lys or Asn or Thr
  MISC_FEATURE (526)..(526): Absent or Ser or Asp or Glu or Arg or Pro or Gly or Ala or Lys or Trp
  MISC_FEATURE (527)..(527): Pro or Ser or Absent or Gly or Val or Arg or Thr or Ala or Asp
  MISC_FEATURE (528)..(528): Thr or Ser or Val or Absent or Tyr or Gly or Ile or Phe
  MISC_FEATURE (529)..(529): Ser or Ala or Absent or Val or Gly or Asp or Lys or Asn or Ile
  MISC_FEATURE (530)..(530): Ser or Gly or Ala or Absent or Thr or Met or Arg or His or Ile
  MISC_FEATURE (531)..(531): Thr or Ser or Absent or Ile or Pro or Val or Arg or Asp
  MISC_FEATURE (532)..(532): Ser or Thr or Ala or Absent or Pro or Arg or Asp
  MISC_FEATURE (533)..(533): Gln or Ser or Lys or Absent or Pro or Arg or Gly or Cys or Met or Ala
  MISC_FEATURE (534)..(534): Arg or Gln or Gly or Pro or Lys or Absent
  MISC_FEATURE (535)..(535): Lys or Asn or Cys or Arg or Absent or Ser or Ile
  MISC_FEATURE (537)..(537): Thr or Leu or Asp or His or Val or Absent or Asn
  MISC_FEATURE (538)..(538): Ile or Leu or Met or Val or Absent
  MISC_FEATURE (539)..(539): Lys or Glu or Gln or Pro or Arg or Absent
  MISC_FEATURE (541)..(541): Arg or Gln or Trp or Ser or Met or Asn or Absent or Gly or Cys or Thr
  MISC_FEATURE (544)..(544): Gln or Arg or Ala or His or Absent or Leu
  MISC_FEATURE (546)..(546): Ser or Leu or Cys or Ala or Ile or Absent
  MISC_FEATURE (547)..(547): Ser or Asp or His or Ala or Pro or Glu or Absent or Leu or Phe
  MISC_FEATURE (548)..(548): Absent or Arg or Gly or Glu or Ala or Ser or Asp
  MISC_FEATURE (549)..(549): Absent or Thr or Val or Asp or Glu or Gln
  MISC_FEATURE (550)..(550): Absent or Gln or His or Lys or Asp or Cys or Leu or Glu or Pro
  MISC_FEATURE (551)..(551): Absent or Leu or Ile or Ala or Cys or Phe or Ser or His
  MISC_FEATURE (552)..(552): Absent or Pro or Arg or Ser or Ala or Gly
  MISC_FEATURE (553)..(553): Absent or Gly or Ser or Cys
  MISC_FEATURE (554)..(554): Absent or Trp or Leu or Phe
  MISC_FEATURE (555)..(555): Absent or Ser or Lys or Phe or His or Glu
  MISC_FEATURE (556)..(556): Absent or Ala or Ser
  MISC_FEATURE (557)..(557): Absent or Ile or Val or Asp or Gly or Thr or Cys or Phe
  MISC_FEATURE (558)..(558): Absent or Gly or His or Pro or Ala or Leu or Arg or Phe
  MISC_FEATURE (559)..(559): Absent or Leu or Glu or His or Pro or Ala or Lys or Ser or Val
  MISC_FEATURE (560)..(560): Absent or Tyr or Asn or His or Pro or Asp or Thr or Gln or Val
  MISC_FEATURE (561)..(561): Absent or Cys or His or Pro or Val or Thr or Ser
  MISC_FEATURE (562)..(562): Absent or Ser or His or Pro or Ala or Thr or Asp or Cys
  MISC_FEATURE (563)..(563): Absent or Lys or Asn or Gly or Ser or Pro or Asp or Glu or Leu
  MISC_FEATURE (564)..(564): Absent or Leu or Asp or Pro or Trp or Ser or Gln or Glu
  MISC_FEATURE (565)..(565): Absent or Arg or Glu or Ala or His or Ser or Cys or Pro or Asp or Val or Tyr
  MISC_FEATURE (566)..(566): Absent or Val or Ile or Ala or His or Pro or Gly or Phe or Ser or Asp
  MISC_FEATURE (567)..(567): Absent or Leu or Ile or Ala or Gln or Val
  MISC_FEATURE (568)..(568): Absent or His or Pro or Leu or Phe or Val or Asp or Ala or Ser or Thr or Lys
  MISC_FEATURE (569)..(569): Absent or Val or Leu or Pro or Ser or Ala or Phe
  MISC_FEATURE (570)..(570): Absent or Asn or Thr or Asp or Leu or Ser or Phe or Tyr or Glu
  MISC_FEATURE (571)..(571): Absent or Arg or Leu or Pro or Gln or Thr or Ser or Ala or Asp
  MISC_FEATURE (572)..(572): Absent or Cys or Asp or Arg or Val or Pro or His or Leu or Phe or Met
  MISC_FEATURE (573)..(573): Absent or Arg or Ala or Ser or Met or Gly or Phe
  MISC_FEATURE (574)..(574): Absent or His or Asn or Ala or Ser or Phe or Lys
  MISC_FEATURE (575)..(575): Absent or Ile or Leu or Phe
  MISC_FEATURE (576)..(576): Absent or Cys or Trp or Arg or Gln or Glu
  MISC_FEATURE (577)..(577): Absent or Asp or Ile or Lys or Thr
  MISC_FEATURE (578)..(578): Absent or Gln or Leu or Cys or Glu or Ala
  MISC_FEATURE (579)..(579): Absent or Ser or Gly or Cys or Arg
  MISC_FEATURE (580)..(580): Absent or Leu or Cys or Asn or Pro or Ser
  MISC_FEATURE (581)..(581): Absent or Leu or Gln or Ser or Val
  MISC_FEATURE (582)..(582): Absent or Ala or His or Gly or Glu or Thr
  MISC_FEATURE (583)..(583): Absent or Leu or Val or Trp or Thr
  MISC_FEATURE (584)..(584): Absent or Gly or Arg or Val
  MISC_FEATURE (585)..(585): Absent or Asn or Asp or Trp or Ile or Phe
  MISC_FEATURE (586)..(586): Absent or Gly or Pro
  MISC_FEATURE (587)..(587): Absent or Cys or Ala or His
  MISC_FEATURE (588)..(588): Absent or Pro or Arg or Gly or Trp
  MISC_FEATURE (589)..(589): Absent or Arg or Gln or Gly
  MISC_FEATURE (590)..(590): Absent or Leu or Arg or Gln
  MISC_FEATURE (591)..(591): Absent or Glu or Arg or Leu
  MISC_FEATURE (592)..(592): Absent or Ala or Ile or Gly or His
  MISC_FEATURE (593)..(593): Absent or Val or Met or Ala or Arg
  MISC_FEATURE (594)..(594): Absent or His or Tyr or Arg or Glu
  MISC_FEATURE (595)..(595): Absent or Ile or Pro or Gly
  MISC_FEATURE (596)..(596): Absent or Asn or Gln
  MISC_FEATURE (597)..(597): Absent or Gly or Val
  MISC_FEATURE (598)..(598): Absent or Cys or Tyr or Lys or Gln
  MISC_FEATURE (599)..(599): Absent or Ala or Tyr or Ile or Thr
  MISC_FEATURE (600)..(600): Absent or Lys or Gln or Phe or Trp
  MISC_FEATURE (601)..(601): Absent or Val or Leu or Arg
  MISC_FEATURE (602)..(602): Absent or Thr or Ser or Gly or Asp
  MISC_FEATURE (603)..(603): Absent or Asn or Val or Arg
  MISC_FEATURE (604)..(604): Absent or Asn or Ala or Ser
  MISC_FEATURE (605)..(605): Absent or Gly or Ala or Arg or Ser
  MISC_FEATURE (606)..(606): Absent or Leu or Met or Val
  MISC_FEATURE (607)..(607): Absent or Ala or Glu or Phe or Asn
  MISC_FEATURE (608)..(608): Absent or Leu or Met or Arg
  MISC_FEATURE (609)..(609): Absent or Phe or Gly
  MISC_FEATURE (610)..(610): Absent or Thr or Lys or Leu or Phe
  MISC_FEATURE (611)..(611): Absent or Leu or Trp or Ile or Ala
  MISC_FEATURE (612)..(612): Absent or any naturally occurring amino acid or Ser or Met
  MISC_FEATURE (613)..(613): Absent or Arg or Cys or His
  MISC_FEATURE (614)..(614): Absent or Pro or Ser or Arg or Asp
  MISC_FEATURE (615)..(615): Absent or His or Asp or Leu or Ser
  MISC_FEATURE (616)..(616): Absent or Val or Leu or Arg
  MISC_FEATURE (617)..(617): Absent or Asn or Gln or Pro or Gly
  MISC_FEATURE (618)..(618): Absent or Leu or Ile or Val
  MISC_FEATURE (619)..(619): Absent or Arg or Lys or Ile
  MISC_FEATURE (620)..(620): Absent or Val or Glu or Leu or Thr
  MISC_FEATURE (621)..(621): Absent or Tyr or Leu or Met
  MISC_FEATURE (622)..(622): Absent or Glu or Tyr or Asp
  MISC_FEATURE (623)..(623): Absent or Val or Glu or Ser
  MISC_FEATURE (624)..(624): Absent or Met or Ile or Leu
  MISC_FEATURE (625)..(625): Absent or Ser or Thr or Leu
  MISC_FEATURE (626)..(626): Absent or Ile or Ala
  MISC_FEATURE (627)..(627): Absent or Gly or Val or Ile
  MISC_FEATURE (628)..(628): Absent or Pro or Gly
  MISC_FEATURE (629)..(629): Absent or Ser or Asn or Ile
  MISC_FEATURE (630)..(630): Absent or Ile or Trp or Cys
  MISC_FEATURE (631)..(631): Absent or Glu or Pro
  MISC_FEATURE (632)..(632): Absent or Asn or Trp
  MISC_FEATURE (633)..(633): Absent or Leu or Gln
  MISC_FEATURE (634)..(634): Absent or Phe or Cys
  MISC_FEATURE (635)..(635): Absent or Arg or Leu
  MISC_FEATURE (636)..(636): Absent or Leu
  MISC_FEATURE (637)..(637): Absent or His
XXXXXXXXXXXXXXXXXXXXXXXXXXXXXXXXXXXXXXXXXXXXXXXXXXXXXXXXXXYSCGXXXXXXXXXXXXXXXXXXXXXXXXXXXXXXXXXXXXXXXXXXCGYXLNLXSSXRXTXXXXXXXXXXXXXXXXXXXGXXYXKXXXXXGXXXFXXXDXXRFTXXDEXXCXXXXXXXXXXXXXXXXXXXXXXXXXXXXXXXXXXXXXXXXXXXXXXXXXXXXXXXXXXXXXXXXXXXXXXXXXXXXXXXXXXXXXXXXXXXXXXXXXXXXXXXXXXXXXXXXXXXXXXXXXXXXXXXXXXXXXXXXXXXXXXXXXXXXXXXXXWXXFRXRTXLXXXXXXXXXXXXXXXXXXXXXXXXXXXXXXXXXXXXXXXXXXXXXXXXXXXXXXXXXXXLCRKCGXXXXXXXXXXXXXXXXXXXXXXXXXXXXXXXXXXXXXXXXXXGXXYXXXXXXXXXXXXXXXXXXXXXXXXXXXXXXXXXXXXXXXXXXXXXXXXXXXXXXXXXXXXXXXXXXXXXXXXXXXXXXXXXXXXXXXXXXXXYXXXIXALXPXXXXXXXXXXXXXXXXXXXXXXXXXXXXXXXXXXXXXXXXXXXXXXXXXXXXXXXXXXXXXXXXXXXXXXXXXXXXXXXXXXXXXXXXXXXX

SEQ ID NO: 17400 - protein, 171 aa, Artificial
  Consensus of seq. id no. 236 and its homologs
  MISC_FEATURE (1)..(1): Met or Absent
  MISC_FEATURE (2)..(2): Asp or Absent
  MISC_FEATURE (3)..(3): Gln or Glu or Absent
  MISC_FEATURE (4)..(4): Val or His or Absent
  MISC_FEATURE (5)..(5): Glu or Gly or Absent
  MISC_FEATURE (6)..(6): Glu or Absent
  MISC_FEATURE (7)..(7): Lys or Absent
  MISC_FEATURE (8)..(8): Glu or Absent
  MISC_FEATURE (9)..(9): Gly or Glu or Absent
  MISC_FEATURE (10)..(10): Asn or Absent
  MISC_FEATURE (11)..(11): Arg or Lys or Absent
  MISC_FEATURE (12)..(12): Phe or Ser or Absent
  MISC_FEATURE (13)..(13): Gln or Absent
  MISC_FEATURE (14)..(14): Glu or Asp or Absent
  MISC_FEATURE (15)..(15): Pro or Ser or Absent
  MISC_FEATURE (16)..(16): Ala or Absent
  MISC_FEATURE (17)..(17): Ser or Leu or Absent
  MISC_FEATURE (18)..(18): Asp or Ala or Absent
  MISC_FEATURE (19)..(19): Arg or Ala or Absent
  MISC_FEATURE (20)..(20): Cys or Glu or Absent
  MISC_FEATURE (21)..(21): Glu or Gln or Absent
  MISC_FEATURE (22)..(22): Asp or Arg or Absent
  MISC_FEATURE (23)..(23): Asn or Glu or Absent
  MISC_FEATURE (24)..(24): Glu or Absent
  MISC_FEATURE (25)..(25): Asp or Thr or Absent
  MISC_FEATURE (26)..(26): Lys or Ala or Absent
  MISC_FEATURE (27)..(27): Glu or Ala or Absent
  MISC_FEATURE (28)..(28): Gln or Ala or Absent
  MISC_FEATURE (29)..(29): Asp or Glu or Absent
  MISC_FEATURE (30)..(30): Asn or Gly or Absent
  MISC_FEATURE (31)..(31): Ser or Glu or Absent
  MISC_FEATURE (32)..(32): Glu or Asp or Absent
  MISC_FEATURE (33)..(33): Glu or Thr or Absent
  MISC_FEATURE (34)..(34): Ser or Absent
  MISC_FEATURE (35)..(35): Ser or Glu or Absent
  MISC_FEATURE (36)..(36): Ser or Glu or Absent
  MISC_FEATURE (37)..(37): Val or Ser or Absent
  MISC_FEATURE (38)..(38): Asp or Thr or Absent
  MISC_FEATURE (39)..(39): Gln or Asp or Absent
  MISC_FEATURE (40)..(40): Arg or Gln or Absent
  MISC_FEATURE (41)..(41): Lys or Arg or Absent
  MISC_FEATURE (42)..(42): Glu or Absent
  MISC_FEATURE (43)..(43): Glu or Asp or Absent
  MISC_FEATURE (44)..(44): Glu or Gly or Absent
  MISC_FEATURE (45)..(45): Glu or His or Absent
  MISC_FEATURE (46)..(46): Absent or Gly
  MISC_FEATURE (47)..(47): Absent or Tyr
  MISC_FEATURE (48)..(48): Absent or Lys
  MISC_FEATURE (49)..(49): Absent or Ala
  MISC_FEATURE (50)..(50): Glu or Asp or Absent
  MISC_FEATURE (52)..(52): Lys or Ser
  MISC_FEATURE (53)..(53): Glu or Ala or Pro
  MISC_FEATURE (54)..(54): Gly or Ser
  MISC_FEATURE (55)..(55): Cys or Leu
  MISC_FEATURE (56)..(56): Glu or Leu or Phe
  MISC_FEATURE (57)..(57): Glu or Pro or Val
  MISC_FEATURE (58)..(58): Ala or Glu or His
  MISC_FEATURE (59)..(59): Thr or Asp or Pro
  MISC_FEATURE (60)..(60): Pro or Asp or Absent
  MISC_FEATURE (61)..(61): Ala or Val or Absent
  MISC_FEATURE (62)..(62): Ala or Gly or Absent
  MISC_FEATURE (63)..(63): Ala or Ser or Absent
  MISC_FEATURE (64)..(64): Ala or Gly or Absent
  MISC_FEATURE (65)..(65): Ala or Glu or Absent
  MISC_FEATURE (66)..(66): Ala or Absent
  MISC_FEATURE (67)..(67): Ala or Ser or Absent
  MISC_FEATURE (68)..(68): Ala or Cys
  MISC_FEATURE (69)..(69): Pro or Ala or Ser
  MISC_FEATURE (70)..(70): Ser or Pro or Leu
  MISC_FEATURE (71)..(71): Phe or His or Leu
  MISC_FEATURE (72)..(72): Phe or Leu
  MISC_FEATURE (73)..(73): Ala or Gly or Arg
  MISC_FEATURE (74)..(74): His or Tyr
  MISC_FEATURE (75)..(75): Pro or Leu
  MISC_FEATURE (76)..(76): Cys or Val
  MISC_FEATURE (77)..(77): Ser or Arg
  MISC_FEATURE (78)..(78): Leu or Ala
  MISC_FEATURE (79)..(79): Leu or Tyr
  MISC_FEATURE (80)..(80): Gln or Arg or Ala
  MISC_FEATURE (81)..(81): Tyr or Ala or Trp
  MISC_FEATURE (82)..(82): Ile or Cys
  MISC_FEATURE (83)..(83): Ala or Met
  MISC_FEATURE (84)..(84): Arg or Gly
  MISC_FEATURE (85)..(85): Val or Phe or Met
  MISC_FEATURE (86)..(86): Cys or Leu or Ala
  MISC_FEATURE (87)..(87): Ala or Gly or Asp
  MISC_FEATURE (88)..(88): Cys or Leu or Trp
  MISC_FEATURE (89)..(89): Cys or His or Phe
  MISC_FEATURE (90)..(90): Leu or Gly
  MISC_FEATURE (91)..(91): Gly or Cys
  MISC_FEATURE (92)..(92): Leu or Gly
  MISC_FEATURE (93)..(93): Ser or Gly
  MISC_FEATURE (94)..(94): Asp or Thr
  MISC_FEATURE (95)..(95): Ser or Gln or Arg
  MISC_FEATURE (96)..(96): Phe or Lys or Pro
  MISC_FEATURE (97)..(97): Cys or Pro or Ser
  MISC_FEATURE (98)..(98): Asp or Ala
  MISC_FEATURE (99)..(99): Pro or Ala
  MISC_FEATURE (100)..(100): Lys or Ala or Pro
  MISC_FEATURE (102)..(102): Ser or Val or Ala
  MISC_FEATURE (103)..(103): Ser or Ala
  MISC_FEATURE (104)..(104): Val or Ala or Leu
  MISC_FEATURE (105)..(105): Leu or Ser or Asn
  MISC_FEATURE (106)..(106): Val or Ala or Ser
  MISC_FEATURE (107)..(107): Pro or Ala or Ser
  MISC_FEATURE (108)..(108): Glu or Arg
  MISC_FEATURE (109)..(109): Pro or Ala or Glu
  MISC_FEATURE (110)..(110): Glu or Ala
  MISC_FEATURE (111)..(111): Pro or Thr or Ala
  MISC_FEATURE (112)..(112): Ala or Gly
  MISC_FEATURE (113)..(113): Ala or Glu
  MISC_FEATURE (115)..(115): Asp or Ala
  MISC_FEATURE (116)..(116): Pro or Ser or Gly
  MISC_FEATURE (117)..(117): Ser or Val
  MISC_FEATURE (118)..(118): Gln or Ser or Arg
  MISC_FEATURE (119)..(119): Glu or Gln or Thr
  MISC_FEATURE (120)..(120): Gly or Asp or Arg
  MISC_FEATURE (122)..(122): Glu or Ile
  MISC_FEATURE (123)..(123): Asp or Ser
  MISC_FEATURE (124)..(124): Met or Gly or Ser
  MISC_FEATURE (125)..(125): Lys or Gly or Absent
  MISC_FEATURE (126)..(126): Absent or Val
  MISC_FEATURE (127)..(127): Absent or Asp or Ser
  MISC_FEATURE (128)..(128): Absent or Met or Lys
  MISC_FEATURE (129)..(129): Absent or Ala or Thr
  MISC_FEATURE (130)..(130): Absent or Lys or Thr
  MISC_FEATURE (131)..(131): Absent or Ala or Asp
  MISC_FEATURE (132)..(132): Absent or Asn or Arg
  MISC_FEATURE (133)..(133): Absent or Gly
  MISC_FEATURE (134)..(134): Absent or Phe
  MISC_FEATURE (135)..(135): Absent or Tyr
  MISC_FEATURE (136)..(136): Ser or Met or Val
  MISC_FEATURE (137)..(137): Ser or His or Arg
  MISC_FEATURE (139)..(139): Ala or Val or Met
  MISC_FEATURE (140)..(140): Thr or Ile
  MISC_FEATURE (141)..(141): Thr or Val
  MISC_FEATURE (142)..(142): Arg or Ser
  MISC_FEATURE (143)..(143): Val or Met
  MISC_FEATURE (144)..(144): Arg or Trp
  MISC_FEATURE (146)..(146): Ala or Val
  MISC_FEATURE (147)..(147): Arg or Ala
  MISC_FEATURE (148)..(148): Absent or Val
  MISC_FEATURE (149)..(149): Absent or Arg
  MISC_FEATURE (150)..(150): Absent or Arg
  MISC_FEATURE (151)..(151): Leu or Pro or Absent
  MISC_FEATURE (154)..(154): Lys or Arg
  MISC_FEATURE (157)..(157): Gly or Asp
  MISC_FEATURE (158)..(158): Asn or His
  MISC_FEATURE (159)..(159): Pro or Ala
  MISC_FEATURE (163)..(163): Ser or Arg
  MISC_FEATURE (166)..(166): Asn or Gly
  MISC_FEATURE (169)..(169): His or Val or Ser
  MISC_FEATURE (171)..(171): His or Asn
XXXXXXXXXXXXXXXXXXXXXXXXXXXXXXXXXXXXXXXXXXXXXXXXXXEXXXXXXXXXXXXXXXXXXXXXXXXXXXXXXXXXXXXXXXXXXXXXXXXXAXXXXXXXXXXXXAXXXXXXEXXXXXXXXXXXXXXXXEXXXXXXAXXXXXXRPXPPXXXREGXGGXGGXHX

SEQ ID NO: 17401 - protein, 170 aa, Artificial
  Consensus of seq. id. no. 237 and its homologs
  MISC_FEATURE (1)..(1): Absent or Met
  MISC_FEATURE (2)..(2): Absent or Asp
  MISC_FEATURE (3)..(3): Absent or Arg or Gln
  MISC_FEATURE (4)..(4): Absent or Val
  MISC_FEATURE (5)..(5): Absent or Glu
  MISC_FEATURE (6)..(6): Absent or Ala or Glu
  MISC_FEATURE (7)..(7): Absent or Tyr or Lys
  MISC_FEATURE (8)..(8): Absent or Leu or Glu
  MISC_FEATURE (10)..(10): Absent or Asp or Asn
  MISC_FEATURE (11)..(11): Absent or Thr or Arg
  MISC_FEATURE (12)..(12): Absent or Ile or Phe
  MISC_FEATURE (13)..(13): Absent or Glu or Gln
  MISC_FEATURE (14)..(14): Absent or Gln or Glu
  MISC_FEATURE (15)..(15): Absent or Val or Pro
  MISC_FEATURE (16)..(16): Absent or Cys or Ala
  MISC_FEATURE (17)..(17): Met or Thr or Absent or Ser
  MISC_FEATURE (19)..(19): Glu or Lys or Absent or Arg
  MISC_FEATURE (20)..(20): Arg or Gln or Absent or Cys
  MISC_FEATURE (21)..(21): Gly or Ala or Absent or Glu
  MISC_FEATURE (22)..(22): Glu or Gly or Absent or Asp
  MISC_FEATURE (23)..(23): Lys or Thr or Absent or Asn
  MISC_FEATURE (25)..(25): Glu or Pro or Absent or Asp
  MISC_FEATURE (26)..(26): Glu or Absent or Lys
  MISC_FEATURE (27)..(27): His or Phe or Gly or Glu
  MISC_FEATURE (28)..(28): Gly or Leu or Pro or Gln
  MISC_FEATURE (31)..(31): Glu or Cys or Ser
  MISC_FEATURE (35)..(35): Ala or Gly or Absent
  MISC_FEATURE (89)..(89): Arg or Absent
  MISC_FEATURE (96)..(96): Ser or Absent
  MISC_FEATURE (97)..(97): Asp or Absent
  MISC_FEATURE (98)..(98): Gly or Absent
  MISC_FEATURE (99)..(99): Ala or Absent
  MISC_FEATURE (100)..(100): Asn or Absent
  MISC_FEATURE (101)..(101): Asp or Absent
  MISC_FEATURE (108)..(108): Asp or Absent
  MISC_FEATURE (109)..(109): Asp or Absent
  MISC_FEATURE (110)..(110): Asp or Absent
  MISC_FEATURE (135)..(135): Absent or Tyr
  MISC_FEATURE (136)..(136): Absent or Phe
  MISC_FEATURE (137)..(137): Absent or Tyr
  MISC_FEATURE (138)..(138): Absent or Met
  MISC_FEATURE (139)..(139): Absent or Gln
XXXXXXXXGXXXXXXXXDXXXXXEXXXXDNXEESXSSVDQRKEEEEEEKEGCEEATPAAAAAAAAPSFFAHPCSLLQYIARVCACCLGXLSDSFCXXXXXXDPKASSXXXVLVPEPEPAAADPSQEGEEDMKSSXXXXXEATTRVRAARLRPKPPGNPREGSGGNGGHHH

SEQ ID NO: 17402 - protein, 2011 aa, Artificial
  Consensus of seq. id no. 240 and its homologs
  MISC_FEATURE (1)..(1): Absent or Met
  MISC_FEATURE (2)..(2): Absent or Gly
  MISC_FEATURE (3)..(3): Absent or Phe
  MISC_FEATURE (4)..(4): Absent or Met or Gly
  MISC_FEATURE (5)..(5): Absent or Leu or Phe
  MISC_FEATURE (6)..(6): Absent or Gln or Gly
  MISC_FEATURE (7)..(7): Absent or Val or Phe
  MISC_FEATURE (8)..(8): Absent or Val or Gly
  MISC_FEATURE (9)..(9): Absent or Arg or Trp
  MISC_FEATURE (10)..(10): Absent or Ser or Phe
  MISC_FEATURE (11)..(11): Absent or Leu or His
  MISC_FEATURE (12)..(12): Absent or Leu or Ile
  MISC_FEATURE (13)..(13): Absent or Tyr or His
  MISC_FEATURE (14)..(14): Absent or Arg or any naturally occurring amino acid
  MISC_FEATURE (15)..(15): Absent or Leu or Phe
  MISC_FEATURE (16)..(16): Absent or Leu or Pro
  MISC_FEATURE (17)..(17): Absent or Asp or Phe
  MISC_FEATURE (18)..(18): Absent or Leu or His
  MISC_FEATURE (19)..(19): Absent or Leu or Pro
  MISC_FEATURE (20)..(20): Absent or Tyr or Leu
  MISC_FEATURE (21)..(21): Absent or Ala or Pro
  MISC_FEATURE (22)..(22): Absent or Phe or Asp
  MISC_FEATURE (23)..(23): Absent or Val or Leu
  MISC_FEATURE (24)..(24): Absent or Glu or Pro
  MISC_FEATURE (25)..(25): Absent or His or Arg
  MISC_FEATURE (26)..(26): Absent or Leu
  MISC_FEATURE (27)..(27): Absent or Pro or Leu
  MISC_FEATURE (28)..(28): Absent or Phe or Pro
  MISC_FEATURE (29)..(29): Absent or Ser or Thr or Met
  MISC_FEATURE (30)..(30): Absent or Ser or Leu or Glu
  MISC_FEATURE (31)..(31): Absent or Ser or Glu or Gly
  MISC_FEATURE (32)..(32): Absent or Ala or Ile
  MISC_FEATURE (33)..(33): Absent or Ile or Pro or His
  MISC_FEATURE (34)..(34): Absent or Pro or Ser
  MISC_FEATURE (35)..(35): Absent or Ser or Pro or Asn
  MISC_FEATURE (36)..(36): Absent or Thr or Ser
  MISC_FEATURE (37)..(37): Absent or Arg or Ser or Asn
  MISC_FEATURE (38)..(38): Absent or Gln or Pro or Met
  MISC_FEATURE (39)..(39): Absent or Glu or Ser or Gly
  MISC_FEATURE (40)..(40): Absent or Ser or Trp or Phe
  MISC_FEATURE (41)..(41): Absent or Ser or His
  MISC_FEATURE (42)..(42): Absent or Ser or Val or Gly
  MISC_FEATURE (43)..(43): Absent or Thr or Pro or Arg
  MISC_FEATURE (44)..(44): Absent or Phe or Glu or Met
  MISC_FEATURE (45)..(45): Absent or Thr or Asn or Ser
  MISC_FEATURE (46)..(46): Absent or Ala or Glu or Phe
  MISC_FEATURE (47)..(47): Absent or Gln or Leu or Arg
  MISC_FEATURE (48)..(48): Absent or Pro or Met or Arg or Lys
  MISC_FEATURE (49)..(49): Absent or Leu or Asp or Tyr or Cys
  MISC_FEATURE (50)..(50): Absent or Leu or Ala or His or Ser
  MISC_FEATURE (51)..(51): Absent or Leu or Pro or Ala
  MISC_FEATURE (52)..(52): Absent or Tyr or Ser or Cys or Pro
  MISC_FEATURE (53)..(53): Absent or Ala or Leu or Pro or Arg
  MISC_FEATURE (54)..(54): Absent or Ala or Arg or Tyr
  MISC_FEATURE (55)..(55): Absent or Ile or His or Leu or Arg
  MISC_FEATURE (56)..(56): Absent or Leu or Pro or Met or Lys
  MISC_FEATURE (57)..(57): Absent or Val or Phe or Gly or Thr or Pro
  MISC_FEATURE (58)..(58): Absent or Val or Ser or Lys or Gln or Thr
  MISC_FEATURE (59)..(59): Absent or Ser or Phe or Thr or Pro or Asn
  MISC_FEATURE (60)..(60): Absent or Leu or Gln or Asp or Ser or Gly
  MISC_FEATURE (61)..(61): Absent or Phe or Ala or Ser
  MISC_FEATURE (62)..(62): Absent or Val or Leu or Lys or Gly
  MISC_FEATURE (63)..(63): Absent or Leu or Ser or Ile or Phe or Gln
  MISC_FEATURE (64)..(64): Absent or Asn or Phe or Met or Arg or Ser or Asp
  MISC_FEATURE (65)..(65): Absent or Val or Ile or Ser or Met or Ala
  MISC_FEATURE (66)..(66): Absent or Phe or Leu or Val or His or Ala or Ser or Pro or Glu
  MISC_FEATURE (67)..(67): Absent or Arg or Ile or Ala or Thr or Leu or Val
  MISC_FEATURE (68)..(68): Absent or Met or Ala or Phe or Pro or Val or Glu or Thr or Gly or Ser
  MISC_FEATURE (69)..(69): Absent or Gly or Ala or Phe or Ser or Leu or Thr or Pro
  MISC_FEATURE (70)..(70): Absent or Thr or Leu or Asn or Ser or Phe or Pro or Tyr
  MISC_FEATURE (71)..(71): Absent or Arg or Thr or Ser or Asn or Lys or Pro or Asp
  MISC_FEATURE (72)..(72): Absent or Ala or Asp or Gln or Met or Pro or Tyr or Ser or Ile
  MISC_FEATURE (73)..(73): Absent or Val or Tyr or Ser or Thr or Pro or Met or Asn or Gln or Ala or Leu
  MISC_FEATURE (74)..(74): Absent or Glu or His or Asn or Thr or Gln or Met or Ser or Pro or Arg or Leu or Asp or Ala
  MISC_FEATURE (75)..(75): Absent or Ser or Arg or Leu or Ile or Asn or Thr or Pro or Gln or Ala or Val
  MISC_FEATURE (76)..(76): Absent or Ser or Lys or Phe or Ile or His or Thr or Asn or Pro or Ala
  MISC_FEATURE (77)..(77): Absent or Gln or Phe or Thr or His or Asp or Cys
  MISC_FEATURE (78)..(78): Absent or Gln or Tyr or Met or Lys or Ser or Thr or Asn or Leu or Arg or Gly or Ile or Ala
  MISC_FEATURE (79)..(79): Absent or Gln or Leu or Tyr or Val or Thr or Ser or Ala or Met or Pro or Glu or Ile
  MISC_FEATURE (80)..(80): Met or Glu or Absent or Leu or Phe or Arg or Ala or Pro or Thr or Tyr or Lys or Ile
  MISC_FEATURE (81)..(81): Ser or Cys or Absent or Met or Pro or Lys or Thr or Ala or Leu or Arg or Asn or Tyr or Trp or Val or Ile or Gln or Phe or Glu
  MISC_FEATURE (82)..(82): Ser or Glu or Absent or Met or Leu or Thr or Ala or Pro or Lys or Gly or Gln or His or Arg or Val
  MISC_FEATURE (83)..(83): Val or His or Met or Ile or Ser or Glu or Phe or Absent or Thr or Pro or Asp or Asn or Ala or Gly or Arg
  MISC_FEATURE (84)..(84): Pro or Ile or Phe or Leu or Absent or Met or Tyr or Cys or Lys or Ala or Ser or Arg or Asp or Val or Gln
  MISC_FEATURE (85)..(85): Thr or Phe or Tyr or Pro or Absent or Arg or Ile or Trp or Glu or Ser or Val or Ala or Asp or Gln or Asn
  MISC_FEATURE (86)..(86): Ser or Arg or Lys or Glu or Gln or Absent or Asn or Ile or Asp or Val or Ala or Gly or Leu or His or Pro
  MISC_FEATURE (87)..(87): Pro or Ser or Ala or Asn or Absent or Lys or Gly or Val or Cys or Ile or Arg or Asp or Gln or Thr or Glu
  MISC_FEATURE (88)..(88): His or Arg or Glu or Ser or Lys or Absent or Asn or Pro or Gln or Thr or Gly or Asp
  MISC_FEATURE (89)..(89): Leu or Tyr or Asn or Glu or Thr or Ile or Val or Absent or Pro or Ala or Phe or Met or Gln
  MISC_FEATURE (90)..(90): Ala or Pro or Absent or His or Leu or Asp or Ser or Phe or Tyr or Gly or Gln or Val or Trp or Met or Asn
  MISC_FEATURE (91)..(91): Lys or Pro or Glu or Val or Leu or Absent or Thr or Gln or Tyr or Asn or Asp or Arg or Ala or Ser or Gly or Phe or Ile
  MISC_FEATURE (92)..(92): Arg or Val or Ile or Pro or Absent or Phe or Ser or Gln or Gly or Asp or Cys or Thr or Ala or Asn or Lys or Leu or Glu
  MISC_FEATURE (93)..(93): Ser or Gln or Phe or Glu or Ala or Pro or His or Absent or Thr or Asp or Asn or Lys or Gly or Val or Met or Leu
  MISC_FEATURE (94)..(94): Ile or Val or Phe or Leu or Absent or Ala or Pro or Trp or Thr or Gln or Ser
  MISC_FEATURE (95)..(95): Pro or Ser or Absent or Thr or Tyr or Gln or Ala or Phe
  MISC_FEATURE (96)..(96): Gln or Asp or Ser or Absent or Thr or Glu or His or Arg or Gly or Asn or Leu or Pro
  MISC_FEATURE (97)..(97): Asp or Asn or Lys or Absent or Thr or Ser or Phe or Tyr or Leu or Met or Trp or His or Glu or Ala
  MISC_FEATURE (98)..(98): Phe or Val or Gln or Leu or Ile or Absent or Tyr or Asn or Thr or Met or Ala or Pro or Cys or His or Asp
  MISC_FEATURE (99)..(99): Lys or Thr or Asp or Absent or Ala or Pro or Arg or Ser or Phe or Leu or His or Ile or Gln
  MISC_FEATURE (100)..(100): Gly or Leu or Val or Absent or Ile or His or Thr or Ser or Pro or Asp or Lys or Glu or Arg or Met
  MISC_FEATURE (101)..(101): Asp or Pro or Trp or Tyr or Ser or Gln or Absent or Asn or Glu or Cys or His or Ala or Gly or Lys or Thr or Leu or Arg or Met
  MISC_FEATURE (102)..(102): Arg or Asp or Ser or Gly or His or Lys or Gln or Absent or Glu or Ile or Ala or Pro or Val or Leu or Thr or Trp or Asn or Phe
  MISC_FEATURE (103)..(103): Asp or Phe or Trp or Cys or Absent or Tyr or Ser or His or Arg or Pro or Val or Asn or Gln or Thr or Lys or Ala or Glu
  MISC_FEATURE (104)..(104): Gln or Val or Leu or Met or Ile or Absent or Phe or Ala or Tyr or Ser or Gly or His or Glu or Pro or Asp or Arg or Thr
  MISC_FEATURE (105)..(105): Ser or Leu or Phe or Tyr or Met or Absent or Arg or Ile or Lys or Glu or Gly or His or Asp or Asn or Ala or Pro or Cys
  MISC_FEATURE (106)..(106): Thr or His or Asp or Glu or Absent or Arg or Lys or Cys or Asn or Ser or Leu or Met or Ala or Gln
  MISC_FEATURE (107)..(107): Leu or Asn or Ser or Tyr or Ala or Absent or Glu or Pro or Gln or Asp or Gly or Ile or Arg or Lys
  MISC_FEATURE (108)..(108): Val or Lys or Phe or Arg or Asp or Glu or Absent or Ile or Ser or Tyr or Thr or Pro or Ala or Gln or Gly
  MISC_FEATURE (109)..(109): Pro or Glu or Thr or His or Absent or Asp or Gln or Lys or Tyr or Gly or Arg or Asn or Ala or Ser or Phe or Met
  MISC_FEATURE (110)..(110): Leu or Phe or Pro or Glu or Val or Absent or Ile or Asp or Lys or Thr or Ala or Met or His
  MISC_FEATURE (111)..(111): Glu or Tyr or Gly or Ser or Ile or Ala or Thr or Absent or Val or Cys or Met or Phe or Lys or Arg or His or Pro or Asn or Leu
  MISC_FEATURE (112)..(112): Thr or Ser or Arg or Gln or Lys or Absent or Ala or Met or Tyr or Val or Phe or Cys or Leu or Asn or Ile or Glu
  MISC_FEATURE (113)..(113): Val or Asp or Gly or Pro or Absent or Cys or Thr or Tyr or Lys or Gln or Ile or Phe or Asn or Ala or Ser or Arg
  MISC_FEATURE (114)..(114): Asp or Lys or Glu or His or Absent or Arg or Ala or Pro or Ser or Phe or Tyr or Leu or Gln or Asn or Val
  MISC_FEATURE (115)..(115): Lys or Met or Asn or Leu or Arg or Absent or Glu or Ser or His or Ile or Ala or Val or Phe or Tyr or Pro or Trp
  MISC_FEATURE (116)..(116): Leu or Ala or Arg or Pro or Gly or Asn or Absent or Trp or Glu or Ser or Val or Asp or Lys or Gln
  MISC_FEATURE (117)..(117): Leu or Phe or Pro or Asn or Ser or Glu or Absent or Arg or Ala or Gln or Lys or Thr or Asp or Gly
  MISC_FEATURE (118)..(118): Asp or Val or Gly or Thr or Ser or Absent or Asn or Lys or Arg or Glu or Ala or Ile
  MISC_FEATURE (119)..(119): Ala or Asp or Phe or Gly or Absent or Tyr or Arg or Lys or Glu or Asn or Gln or His or Ile or Leu or Val or Pro
  MISC_FEATURE (120)..(120): Pro or Ala or Thr or Leu or Val or Ile or Absent or Ser or Asp or Asn or His or Gln or Gly or Arg or Met or Glu or Lys or Tyr
  MISC_FEATURE (121)..(121): Gly or Thr or Asp or Pro or Ala or Absent or Leu or Ile or Met or Ser
  MISC_FEATURE (122)..(122): Ser or Thr or Ala or Leu or Cys or Trp or Absent or Phe or His or Tyr or Val or Asp or Glu or Ile or Gln or Asn or Pro
  MISC_FEATURE (123)..(123): Leu or Gly or Ile or Met or Absent or Phe or Tyr or Thr or Gln or Trp or Cys or Arg or Val or Ser or Asn or Asp or Lys
  MISC_FEATURE (124)..(124): Leu or Absent or Thr or Ile or Val or Pro or Lys or Ser or Ala or Arg or Met or Asp or Tyr or Gly or Glu or His
  MISC_FEATURE (125)..(125): Glu or Absent or Asp or Ala or Ser or Arg or Cys or Gly or Val or Ile or Leu or Met or Phe
  MISC_FEATURE (126)..(126): Thr or Absent or Glu or Ala or Lys or Arg or Ile or Ser or Leu or Pro or Trp
  MISC_FEATURE (127)..(127): Gln or Absent or Leu or Val or Pro or Asn
  MISC_FEATURE (128)..(128): Val or Absent or Ala or Ile or Leu
  MISC_FEATURE (129)..(129): Lys or Absent or Leu or Ile or Phe
  MISC_FEATURE (130)..(130): Phe or Absent or Val or Ala or Ile or Thr or Cys
  MISC_FEATURE (131)..(131): Ile or Absent or Asp or Glu
  MISC_FEATURE (132)..(132): Asn or Absent or Ser or Ala or His
  MISC_FEATURE (133)..(133): Gly or Absent or Ala or Asp or His or Leu
  MISC_FEATURE (134)..(134): Arg or Absent or Thr or Ala or Ser or Asn
  MISC_FEATURE (135)..(135): Leu or Absent or Gly or Ser or Asp or Gln
  MISC_FEATURE (136)..(136): Thr or Absent or Gly or Pro
  MISC_FEATURE (137)..(137): Lys or Absent or Val
  MISC_FEATURE (138)..(138): Val or Absent or Ala
  MISC_FEATURE (139)..(139): Trp or Absent or Arg
  MISC_FEATURE (140)..(140): Lys or Absent or Leu
  MISC_FEATURE (141)..(141): Gln or Absent or Thr
  MISC_FEATURE (142)..(142): Leu or Absent or Cys
  MISC_FEATURE (143)..(143): Pro or Absent or Phe
  MISC_FEATURE (144)..(144): Asn or Absent or Ser or Gln or Thr or Ala or Leu
  MISC_FEATURE (145)..(145): Ser or Absent or Pro or Asp or Cys or Leu or Phe or Gly or His
  MISC_FEATURE (146)..(146): Val or Absent or Glu or Ala or Pro or Asp or Gly or Trp or Leu or Cys or Ser or Thr
  MISC_FEATURE (147)..(147): Arg or Absent or Glu or Ser or Asp or Ala or Val or Thr or Ile or Met or Leu or Tyr or Phe
  MISC_FEATURE (148)..(148): Asp or Absent or Thr or Ser or Gln or Asn or Leu or Glu or Cys or Ile
  MISC_FEATURE (149)..(149): Leu or Absent or Lys or Ser or Gly or Asp or Thr or Arg or Glu or Phe
  MISC_FEATURE (150)..(150): Trp or Lys or Gln or Arg or Absent or Glu or Asp or Asn or His or Thr or Phe or Leu or Ala
  MISC_FEATURE (151)..(151): Met or Gly or His or Gln or Lys or Arg or Absent or Ala or Pro or Glu or Ser or Thr or Ile or Leu or Val or Tyr or Phe or Asp or Asn
  MISC_FEATURE (152)..(152): Phe or Tyr or Ile or Leu or Val or Absent or Asp or Trp or Pro or Lys or Arg or Cys or Thr or Ala
  MISC_FEATURE (153)..(153): Ala or Thr or Ser or Tyr or Gly or Absent or Met or Asp or Lys or Gln or Asn or Leu
  MISC_FEATURE (154)..(154): Ala or Tyr or Phe or Leu or Trp or Gly or Absent or Lys or Val or Ser or Thr or Cys or Met or Arg or Gln or Glu
  MISC_FEATURE (155)..(155): Thr or Gly or Glu or Asp or His or Ala or Absent or Pro or Arg or Gln or Lys or Ser or Val or any naturally occurring amino acid or Leu or Tyr or Phe
  MISC_FEATURE (156)..(156): Thr or Gln or Leu or Glu or Absent or Lys or Asp or Asn or Ala or Gly or Ser or Arg or Pro
  MISC_FEATURE (157)..(157): Tyr or Val or Leu or Ala or Absent or Ser or Phe or Gln or Gly or Arg or Met or Asp or Lys or Ile or Thr or Asn
  MISC_FEATURE (158)..(158): Ala or Arg or Lys or Gln or Absent or His or Leu or Val or Met or Ile or Phe or Tyr or Glu
  MISC_FEATURE (159)..(159): Ser or Arg or Asp or Glu or His or Absent or Val or Asn or Gln or Ala or Leu or Lys or Thr or Gly or Ile or Pro
  MISC_FEATURE (160)..(160): Arg or Asp or Tyr or Thr or Absent or Ser or Ala or Leu or Met or Trp or Gln or Ile or Val or Cys
  MISC_FEATURE (161)..(161): Thr or Ile or Ala or Ser or Absent or Val or Gln or Leu or Lys or Cys or Phe or Tyr
  MISC_FEATURE (162)..(162): Met or Arg or Thr or Asp or Leu or Absent or Tyr or Glu or Gly or Lys or Phe or Val or Ala or Ile or Gln or Pro
  MISC_FEATURE (163)..(163): Ile or Arg or Ser or His or Gly or Absent or Glu or Asp or Val or Phe or Leu or Tyr or Thr or Lys or Gln or Ala or Asn
  MISC_FEATURE (164)..(164): Val or Phe or Leu or Absent or Ile or Tyr or His or Asn or Ser or Thr or Gly or Ala or Pro
  MISC_FEATURE (165)..(165): Ala or Ser or Absent or Gln or His or Asp or Lys or Thr or Gly or Glu or Trp or Pro or Ile
  MISC_FEATURE (166)..(166): Glu or Lys or Ser or Val or Asn or Absent or Thr or Gln or Arg or His or Tyr or Leu or Ala or Gly or Trp or Asp
  MISC_FEATURE (167)..(167): Gly or Ala or Val or Thr or Absent or Asn or Ser or Asp or Arg or Glu
  MISC_FEATURE (168)..(168): Glu or Leu or Absent or Val or Ile or Phe or Asp or Arg or Ala or His or Lys or Gln
  MISC_FEATURE (169)..(169): Ser or Arg or Val or Tyr or Gln or Phe or His or Absent or Ala or Gly or Thr or Cys or Leu or Ile or Lys or Asn
  MISC_FEATURE (170)..(170): His or Ser or Ala or Glu or Tyr or Leu or Absent or Thr or Lys or Gln or Asp or Asn or Arg or Pro or Trp
  MISC_FEATURE (171)..(171): Thr or Leu or Gln or Lys or Ile or Arg or Absent or Ala or Pro or Trp or Glu or Ser or His or Phe or Asn or Asp or Cys
  MISC_FEATURE (172)..(172): Tyr or Gly or Cys or Absent or Trp or Leu or Ser or Phe or Val or Thr or Pro or Arg or Lys or Asn or Ala
  MISC_FEATURE (173)..(173): Ala or Absent or Gly or Lys or Ile or Ser or Asn or Asp or Gln or Pro or Arg or Glu or His or Tyr
  MISC_FEATURE (174)..(174): His or Absent or Ile or Leu or Ser or Gln or Trp or Phe or Tyr or Arg or Pro or Asn or Gly or Asp or Glu
  MISC_FEATURE (175)..(175): Val or Absent or Arg or Gly or Pro or Ala or His or Asp or Gln or Asn or Leu or Thr
  MISC_FEATURE (176)..(176): His or Absent or Pro or Ser or Arg or Gly or Gln or Ala or Ile or Lys or Glu or Asn
  MISC_FEATURE (177)..(177): Lys or Absent or Asp or Glu or Gly or Thr or Leu or Asn or His or Arg or Phe or Ser or Gln or Val
  MISC_FEATURE (178)..(178): Arg or Absent or Thr or Asp or Glu or Gly or Ser or Pro or Lys or Ala or Gln or Leu or Ile
  MISC_FEATURE (179)..(179): Ala or Absent or Ser or Phe or Pro or Asp or Leu or Ile or Cys
  MISC_FEATURE (180)..(180): Met or Absent or Glu or Lys or Ile or Phe or Leu or Ser or Arg
  MISC_FEATURE (181)..(181): Leu or Absent or Thr or Lys or Val or Glu or His or Ser or Arg
  MISC_FEATURE (182)..(182): Thr or Absent or Leu or Phe or Ala or Ile or Val
  MISC_FEATURE (183)..(183): Ala or Absent or Pro or Leu or Gly
  MISC_FEATURE (184)..(184): Thr or Absent or Pro or Leu or Lys or Gln or Arg or Ala or Val or Ser
  MISC_FEATURE (185)..(185): Trp or Absent or Thr or Gly or Ser
  MISC_FEATURE (186)..(186): Leu or Absent or Ala or Pro or Phe
  MISC_FEATURE (187)..(187): Ser or Absent or Thr or Lys or Leu or His or Gln or Ala or Val or Arg or Asn
  MISC_FEATURE (188)..(188): Arg or Absent or Cys or Ser or Ala or Asp or Gly or Lys or Asn
  MISC_FEATURE (189)..(189): Gln or Absent or Gly or Ser or Glu or Leu or Ala or His or Lys or Asn or Val or Thr or Pro or Met
  MISC_FEATURE (190)..(190): Phe or Absent or Arg or Lys or Glu or Ser or Thr or Asn or Leu or Gln or Trp or Gly
  MISC_FEATURE (191)..(191): Gly or Absent or Lys or Glu or Asp or Ala or Pro or Gln or Ser
  MISC_FEATURE (192)..(192): Val or Leu or Absent or Tyr or Asn or Trp or Glu or His or Pro or Gly or Ala or Ile
  MISC_FEATURE (193)..(193): Lys or Arg or Absent or Gly or Asp or Glu or Thr or Asn or Ser or His or Ala or Gln
  MISC_FEATURE (194)..(194): Lys or Gln or Absent or Asp or Arg or Ile or Leu or Val or Ala or Met or Pro or Glu or Ser or Thr or His
  MISC_FEATURE (195)..(195): Gly or Asn or Absent or Gln or Ala or Pro or Lys
  MISC_FEATURE (196)..(196): Asp or Arg or Absent or Pro or Ser or Ala or Glu or Gln or His
  MISC_FEATURE (197)..(197): Arg or Val or Thr or Absent or Ile or Lys or Ala
  MISC_FEATURE (198)..(198): Val or Ala or Absent or Leu or Phe or Met or Ile
  MISC_FEATURE (199)..(199): Ala or Val or Ile or Ser or Leu or Absent or Cys or Gly or Met
  MISC_FEATURE (200)..(200): Ile or Val or Absent or Leu or Pro or Phe or Thr or Ala
  MISC_FEATURE (201)..(201): Val or Tyr or Ala or Absent or Phe or Asn or Met or His or Leu or Gln or Ile
  MISC_FEATURE (202)..(202): Ala or Leu or Gly or Ser or Absent or Met or Asn or Ile or Thr or Val or Phe
  MISC_FEATURE (203)..(203): Arg or Pro or Thr or Absent or Ala or Glu or Val or Ile or Leu or Phe or Asp or Gly or Lys or His or Met or Gln or Ser
  MISC_FEATURE (204)..(204): Asn or Absent or Ser
  MISC_FEATURE (205)..(205): His or Val or Ser or Absent or Thr or Cys or Asn or Asp or Gly
  MISC_FEATURE (206)..(206): Val or Pro or Ile or Thr or Absent or His or Ser or Arg or Tyr or Ala or Leu or Phe or Glu
  MISC_FEATURE (207)..(207): Glu or Trp or Tyr or Asp or Absent or Phe or Leu or Ser or Arg or Gln or Met or Pro or Ala or Thr
  MISC_FEATURE (208)..(208): Phe or Tyr or Trp or Absent or Ser or Leu or Asn or Ile or Ala or Thr
  MISC_FEATURE (209)..(209): Val or Ala or Pro or Absent or Leu or Ile or Phe or Gly or Thr
  MISC_FEATURE (210)..(210): Ile or Val or Met or Absent or Ala or Ser or Pro or Thr or Leu or Trp or Asn or Phe
  MISC_FEATURE (211)..(211): Gly or Val or Ala or Ile or Absent or Cys or Leu or Met or Pro or Tyr or Ser or Phe or Thr
  MISC_FEATURE (212)..(212): Phe or Ala or Thr or Val or Ile or Absent or Ser or Cys or His or Leu or Met
  MISC_FEATURE (213)..(213): Tyr or Leu or Trp or Phe or Absent or His or Ile or Met
  MISC_FEATURE (214)..(214): Ala or Gly or Ser or Absent
  MISC_FEATURE (215)..(215): Val or Ile or Thr or Met or Absent or Asn or Ala or Cys or Leu or Gly or Ser
  MISC_FEATURE (216)..(216): His or Met or Val or Gln or Absent or Ile or Leu or Thr or Ala or Trp or Phe or Glu or Ser
  MISC_FEATURE (217)..(217): Leu or Ala or Arg or Gln or Lys or Absent or Met or Glu or Asp or Ser or Phe or Cys or Val or Trp or Ile or Tyr
  MISC_FEATURE (218)..(218): Leu or Ala or Val or Ile or Absent or Thr or Cys or Met or Ser or Arg
  MISC_FEATURE (219)..(219): Gly or Absent or Thr or Asp or Asn or Ser
  MISC_FEATURE (220)..(220): Gly or Ala or Absent or Thr or Cys or Val or Leu or Phe
  MISC_FEATURE (221)..(221): Val or Thr or Ile or Absent or Pro or Ser or Cys or Ala or Arg or Lys or Met
  MISC_FEATURE (222)..(222): Pro or Phe or Ala or Ile or Val or Absent or Leu or Met or Thr or Gly or Ser
  MISC_FEATURE (223)..(223): Ala or Ser or Cys or Thr or Absent or Val or Asn or Arg
  MISC_FEATURE (224)..(224): Leu or Gly or Pro or Cys or Absent or Ala or Ser or Thr or Gln or Phe or Val or Ile or Met
  MISC_FEATURE (225)..(225): Val or Ala or Thr or Absent or Ser or Phe or Ile or Gly or Arg or Leu
  MISC_FEATURE (226)..(226): Asn or Ser or Absent or Ala or Leu or Gly
  MISC_FEATURE (227)..(227): Ala or Pro or Absent or Ser or Thr or Val or Cys or Tyr or Asn
  MISC_FEATURE (228)..(228): Phe or Ala or Asp or Gln or Absent or Ser or Tyr or Val or Thr or Gly or Leu
  MISC_FEATURE (229)..(229): Leu or Ala or Tyr or Phe or Absent or Ser or His or Gln or Ile or Thr or Cys
  MISC_FEATURE (230)..(230): Pro or His or Thr or Leu or Ser or Absent or Lys or Ala or Asp or Glu or Val or Gly or Asn
  MISC_FEATURE (231)..(231): Gly or Ser or Ile or Ala or Lys or Absent or Val or Pro or Leu or Thr or Arg or Asp
  MISC_FEATURE (232)..(232): Lys or Ser or Asp or Glu or Gln or Absent or Ile or Phe or Ala or Pro or Leu or Gly or Asn or Arg or Thr or His
  MISC_FEATURE (233)..(233): Ala or Glu or Absent or Asp or Ser
  MISC_FEATURE (234)..(234): Ile or Leu or Absent or Phe or Ala or Val or any naturally occurring amino acid
  MISC_FEATURE (235)..(235): Tyr or Val or Ala or Thr or Ser or Absent or Lys or Glu or Cys or Leu or Gly or Gln or Arg or Met or His or Phe
  MISC_FEATURE (236)..(236): Asp or Lys or Tyr or Phe or Absent or His or Ala or Asn or Pro or any naturally occurring amino acid or Trp or Leu
  MISC_FEATURE (237)..(237): Cys or Gln or Ser or Ile or Absent or Ala or Thr or Val or Pro or Gly or Leu
  MISC_FEATURE (238)..(238): Ile or Val or Leu or Thr or Absent or Phe or Ala or Cys or Tyr
  MISC_FEATURE (239)..(239): Arg or Glu or Lys or Gly or Gln or Absent or Asp or Thr or Leu or Val or Asn or Ala or Ser or Met
  MISC_FEATURE (240)..(240): Asp or Ser or Thr or Ala or Ile or Glu or Absent or Met or Leu or Val or Pro or Asn or Gln or Arg or Gly or His or Phe
  MISC_FEATURE (241)..(241): Val or Ala or Ser or Cys or Absent or Thr or Pro
  MISC_FEATURE (242)..(242): Gly or Asp or Gln or Lys or Absent or Asn or Arg or Ser or Val or Thr or Leu or Glu or Ala or any naturally occurring amino acid
  MISC_FEATURE (243)..(243): Ser or Gly or Pro or Ala or Absent or Thr or Ile or Val or Cys
  MISC_FEATURE (244)..(244): Lys or Ser or Thr or Arg or Absent or Gln or Asn or Gly or Val or Ala or Met or Ile or Glu or Asp or His
  MISC_FEATURE (245)..(245): Val or Leu or Ile or Absent or Ala or Ser or Met or Trp or Phe or His or Tyr or Lys or Thr or Gly
  MISC_FEATURE (246)..(246): Ala or Ile or Met or Leu or Absent or Val or Ser or Phe
  MISC_FEATURE (247)..(247): Leu or Val or Phe or Ile or Absent or Thr or Ala
  MISC_FEATURE (248)..(248): Phe or Ser or Ala or Val or Absent or Thr or Tyr or Cys or Pro or Met or Ile
  MISC_FEATURE (249)..(249): Asp or Thr or Ser or His or Absent or Cys or Gln or Tyr or Asn or Ala or Glu or Val or Pro or Ile or Leu
  MISC_FEATURE (250)..(250): Val or Leu or Glu or Ser or Pro or Absent or Ala or Asn or Thr or Arg or Gln or Lys or His or Asp or Met
  MISC_FEATURE (251)..(251): Glu or Pro or Asp or Absent or Ala or Lys or Thr or Ser or Gln or Gly or Val or Asn or His or Arg or Cys or Met
  MISC_FEATURE (252)..(252): Arg or Thr or Asn or Glu or Absent or Tyr or Lys or Phe or Leu or Val or Ala or Ser or Gln or Cys or Gly or His or Ile
  MISC_FEATURE (253)..(253): Phe or Tyr or Ile or Val or Gly or Asp or Gln or Absent or Leu or Arg or Glu or Ser or Ala or Lys or Trp
  MISC_FEATURE (254)..(254): Arg or His or Asp or Ser or Asn or Cys or Absent or Phe or Leu or Lys or Pro or Glu or Gln or Gly
  MISC_FEATURE (255)..(255): Arg or Lys or Asn or Leu or Phe or Absent or Tyr or Thr or Ile or Val or Glu or Ala or His
  MISC_FEATURE (256)..(256): Leu or Val or Ala or Glu or Lys or Asp or Absent or Ser or Pro or Thr or Ile or Gly or Met
  MISC_FEATURE (257)..(257): Arg or Lys or Gln or Asn or Ala or Thr or Absent or Ser or Ile or Val or Met or Glu or Asp or Leu or Phe
  MISC_FEATURE (258)..(258): Asp or Ala or Gly or Met or Absent or Thr or Val or Ser or His or Gln or Glu or Lys or Arg or Ile or Tyr
  MISC_FEATURE (259)..(259): Ala or Cys or Phe or Leu or Ile or Absent or Gln or Met or Val or Gly or Asn or Asp or Glu or Pro
  MISC_FEATURE (260)..(260): Glu or Gly or Ala or Ile or Gln or Absent or Ser or Pro or Lys or Val or Leu or Thr or Arg or Asp or Asn or Trp or Phe
  MISC_FEATURE (261)..(261): Glu or Leu or Ala or Absent or Val or Asp or Lys or Ser or Gln or Ile or Phe or Gly
  MISC_FEATURE (262)..(262): Asn or Pro or Lys or Ala or Ser or Absent or Leu or Glu or Ile or Val or Gln or Arg or Thr
  MISC_FEATURE (263)..(263): Phe or Val or Lys or Ser or Arg or Absent or Asp or Gln or Ala or Leu or Tyr or Ile or Thr or His or Glu
  MISC_FEATURE (264)..(264): Val or Ile or Gly or Gln or Met or Lys or Glu or Absent or Ala or Arg or Thr or Asn or Cys or Ser or Phe or Pro or Leu or Tyr
  MISC_FEATURE (265)..(265): His or Ile or Ala or Asn or Thr or Absent or Val or Tyr or Lys or Asp or Ser or Leu or Phe or Met or Pro or Glu or Gln or Arg or Gly
  MISC_FEATURE (266)..(266): Lys or Leu or Pro or Asn or Gly or Ser or Absent or His or Ala or Thr or Asp or Arg or Val or Glu or Phe or Cys or Ile
  MISC_FEATURE (267)..(267): Leu or Gly or Lys or Ile or Absent or Val or Met or Asn or Ala or Phe or Asp or Arg or Pro or Ser or Glu or His
  MISC_FEATURE (268)..(268): Phe or Absent or Glu or Pro or Ala or Ser or Lys or Asp or Gly or Cys or Gln or Arg or Leu or Asn
  MISC_FEATURE (269)..(269): Thr or Absent or Asn or Arg or Ser or Leu or Asp or Gly or Phe or Lys or Ala or Gln or Ile or Glu or Val
  MISC_FEATURE (270)..(270): Gln or Absent or Val or Asp or Asn or Arg or Thr or Glu or Leu or Lys or Pro or Gly or Ala or Ile or Tyr or Phe or Ser
  MISC_FEATURE (271)..(271): Ala or Absent or Ile or Arg or Gly or Asn or Asp or Lys or Glu or Thr or Phe or Trp or Pro
  MISC_FEATURE (272)..(272): Ser or Absent or Leu or Val or Arg or Asn or Ile or Gly or Asp or Ala or Glu or Gln or Thr
  MISC_FEATURE (273)..(273): Pro or Absent or Leu or Val or Ile or Thr or Arg or Lys or Asp or Phe or Ser or Gly or Ala
  MISC_FEATURE (274)..(274): Asp or Absent or Glu or Ile or Val or Leu or Tyr or Phe or His or Asn or Ala or Gly or Ser or Lys or Arg or Pro
  MISC_FEATURE (275)..(275): Cys or Absent or Gly or Ile or Leu or Phe or His or Val or Arg or Pro or Lys or Ser or Asn or Asp
  MISC_FEATURE (276)..(276): Val or Absent or Gln or Met or Glu or Asp or Phe or Leu or Gly or Thr or Ile or Ser or Trp
  MISC_FEATURE (277)..(277): Asp or Absent or Glu or Ala or Val or Thr or Pro or Tyr or Phe or Leu
  MISC_FEATURE (278)..(278): Asp or Absent or Pro or Ala or Thr or Gly or Val or Leu or Ile or Asn or Met
  MISC_FEATURE (279)..(279): Phe or Absent or Ala or Arg or Gly or Pro or Gln or Val or Cys or Thr or Asp
  MISC_FEATURE (280)..(280): Gly or Absent or Thr or Glu or Ser or Val or Pro or Ala or Asp or Gln
  MISC_FEATURE (281)..(281): Cys or Absent or Val or Pro or Ser or Glu or Gln or Ala or Asn or Asp or Leu
  MISC_FEATURE (282)..(282): Thr or Absent or Leu or Phe or Ser or Gln or Ile or Glu or Ala or Val or Arg or Gly
  MISC_FEATURE (283)..(283): Pro or Absent or Lys or Glu or Ile or Leu or Ser or Thr or Asp or Arg or Val or Asn or His
  MISC_FEATURE (284)..(284): Gly or Absent or Tyr or Cys or Lys or Pro or Val or Glu or Ala or Leu or Asp or Trp or Phe
  MISC_FEATURE (285)..(285): Ala or Absent or Thr or Asp or Gly or Ser or Glu or Phe or Arg or Leu or Pro or Met or His or Ile or Val
  MISC_FEATURE (286)..(286): His or Absent or Glu or Asn or Ser or Thr or Pro or Val or Ala or Tyr or Leu or Phe or Gly
  MISC_FEATURE (287)..(287): Ser or Absent or Arg or Glu or Asp or Lys or Pro or Ile or Val or Thr or Gly
  MISC_FEATURE (288)..(288): Gly or Absent or Asn or Thr or Ser or Asp or Pro or Ala or Trp or Ile or Leu
  MISC_FEATURE (289)..(289): Leu or Absent or Tyr or Ala or His or Val or Pro or Asp or Lys or Gln or Ser
  MISC_FEATURE (290)..(290): Ser or Absent or Gly or Asp or Asn or Val or Ile or Leu or Pro or Phe or Gln
  MISC_FEATURE (291)..(291): Gly or Absent
  MISC_FEATURE (292)..(292): Val or Absent
  MISC_FEATURE (293)..(293): Ala or Absent
  MISC_FEATURE (294)..(294): Val or Absent
  MISC_FEATURE (295)..(295): Phe or Absent
  MISC_FEATURE (296)..(296): Ala or Absent
  MISC_FEATURE (297)..(297): Arg or Absent
  MISC_FEATURE (298)..(298): Ser or Absent or Arg or Thr or Pro or Tyr or Phe or Ala
  MISC_FEATURE (299)..(299): Phe or Absent or Ile or Ser or Gly or Ala or Glu or Asp
  MISC_FEATURE (300)..(300): Ser or Absent or Gln
  MISC_FEATURE (301)..(301): Gly or Absent or Arg or Pro
  MISC_FEATURE (302)..(302): Ile or Absent or Lys or Pro
  MISC_FEATURE (303)..(303): Leu or Absent or Thr
  MISC_FEATURE (304)..(304): Ala or Absent or Ser
  MISC_FEATURE (305)..(305): Gln or Absent or Val or Leu or Asn or His or Phe or Arg
  MISC_FEATURE (306)..(306): Glu or Absent or Gly or Asn or Ala or Val or Leu
  MISC_FEATURE (307)..(307): Glu or Absent or Ser or Val or Ile or Lys or Leu or Asp or Arg
  MISC_FEATURE (308)..(308): Arg or Absent or Ser or Pro or Gly or Leu or Ile or Thr or Val or Lys
  MISC_FEATURE (309)..(309): Glu or Absent or His or Pro or Asp or Ala or Tyr or Gln or Gly or Phe or Ser or Val or Leu or Ile or Met
  MISC_FEATURE (310)..(310): Trp or Glu or Absent or Gly or Ile or Val or Pro or Ser or Thr or Met or Leu or Ala or Phe
  MISC_FEATURE (311)..(311): Ala or Glu or Absent or Phe or Arg or Leu or Ser or Tyr or Met or His or Ile or Lys or Pro or Thr or Gln or Asn or Gly or Val
  MISC_FEATURE (312)..(312): Gln or His or Absent or Trp or Pro or Glu or Ile or Lys or Arg or Ala or Val or Leu or Ser or Gly or Asp or Thr or Cys
  MISC_FEATURE (313)..(313): Ala or Val or Absent or Thr or Ser or Asn or Glu or Ile or Leu or Gln or Asp or His or Gly or Arg
  MISC_FEATURE (314)..(314): Asn or Glu or Ser or Leu or Ile or Val or Absent or Lys or Phe or Thr or Ala or Pro or Arg or Gly or Asp or Met or Cys or His
  MISC_FEATURE (315)..(315): Gly or Ala or Ser or Asp or Glu or Absent or Asn or Ile or Phe or Met or Leu or Val or Thr or Arg or Lys or Pro or His
  MISC_FEATURE (316)..(316): Ala or Thr or Lys or Gly or Absent or Glu or Leu or Asp or Asn or Gln or any naturally occurring amino acid or Pro or Val or Ser or Phe or Arg
  MISC_FEATURE (317)..(317): Asn or Ile or Gly or Leu or Absent or Lys or Phe or Thr or Asp or Glu or Gln or Ala or Ser or Pro or Val
  MISC_FEATURE (318)..(318): Asn or His or Cys or Ile or Val or Absent or Thr or Met or Leu or Lys or Gly or Gln or Ser or Ala or Asp or Pro or Glu
  MISC_FEATURE (319)..(319): Val or Trp or Ala or Glu or His or Ser or Gln or Absent or Gly or Asp or Arg or Thr or Leu or Ile or Pro or Lys or Phe or Tyr or any naturally occurring amino acid
  MISC_FEATURE (320)..(320): Phe or Asp or Ser or Glu or Tyr or Absent or Lys or Gly or Thr or Ala or Asn or Gln or Pro or His or Leu or Arg or Ile
  MISC_FEATURE (321)..(321): Asp or Glu or Ile or Gly or Ser or Absent or Val or Ala or Leu or Met or Thr or Asn or Gln or Pro or Arg or Trp or His
  MISC_FEATURE (322)..(322): Ala or Leu or Gln or Arg or Absent or Lys or Glu or Tyr or Ser or Asn or Thr or Gly or Trp or Val or Cys or His or Met
  MISC_FEATURE (323)..(323): Phe or Leu or Thr or Glu or Ala or Ser or Absent or Asn or Asp or Gln or Cys or Pro or Arg or Ile or Lys or Val or Tyr or His or Met
  MISC_FEATURE (324)..(324): Gln or Glu or Leu or Ala or Thr or Ser or Absent or Arg or Pro or Asn or Met or Phe or Val or Asp or Cys or Lys or His
  MISC_FEATURE (325)..(325): Leu or Ala or Val or Arg or Gln or Absent or Glu or Ser or Pro or Lys or Asp or Ile or Thr or Tyr or Phe or Cys or His
  MISC_FEATURE (326)..(326): Asp or Ala or Glu or Lys or Ser or Leu or Pro or Absent or Thr or Arg or Phe or Gln or Val or Gly or Met or Tyr or Ile or Trp
  MISC_FEATURE (327)..(327): Arg or Glu or Lys or Ala or Ile or Absent or Ser or Leu or Val or Tyr or Asp or Gly or Gln or Thr or Phe
  MISC_FEATURE (328)..(328): Lys or Arg or Ser or Pro or Absent or Asn or Thr or Leu or Asp or Glu or Ala or Gly or Gln or Val
  MISC_FEATURE (329)..(329): Phe or Ala or His or Gly or Absent or Leu or Pro or Glu or Lys or Ile or Gln or Val or Asn or Ser or Asp or Thr or Met or Trp or Arg
  MISC_FEATURE (330)..(330): Ala or Gly or Asn or His or Absent or Pro or Ile or Lys or Leu or Val or Met or Glu or Ser or Thr or Asp or Gln or Arg
  MISC_FEATURE (331)..(331): Ser or Val or Thr or Absent or Pro or Asn or Asp or Leu or Lys or Gln or Glu or Arg or Met or Gly
  MISC_FEATURE (332)..(332): Val or Arg or Ala or Ile or Absent or Pro or Ser or Leu or Phe or Met or Gly or Glu or Asp or Asn or Thr
  MISC_FEATURE (333)..(333): Ala or Thr or Glu or Leu or Absent or Lys or Asp or Arg or Gln or Gly or Ser or Phe or Pro or Asn
  MISC_FEATURE (334)..(334): Gln or Asp or Val or Absent or Lys or Met or Pro or Ser or Phe or His or Ala or Gly or Glu or Thr or Arg or Leu or Tyr
  MISC_FEATURE (335)..(335): Ser or His or Pro or Leu or Phe or Absent or Tyr or Ala or Trp or Arg or Thr or Asp or Lys or Glu or Gln or Val or Ile or Cys
  MISC_FEATURE (336)..(336): Ala or Ile or Thr or Val or Absent or Cys or Lys or Arg or Pro or Gln or Asn or Glu or Ser or Gly or Asp
  MISC_FEATURE (337)..(337): Asp or Thr or Phe or Arg or Pro or Glu or Absent or Ala or Lys or His or Ile or Ser or Trp or Asn or Leu or Gly or Val
  MISC_FEATURE (338)..(338): Ala or Asn or Gln or Tyr or Ile or Leu or Absent or Val or Phe or Pro or His or Glu or Asp or Thr or Lys or Ser or Arg
  MISC_FEATURE (339)..(339): Ile or His or Lys or Thr or Absent or Arg or Asp or Gln or Asn or Ala or Glu or Ser or Tyr or Phe or Gly or Leu or Cys or Met
  MISC_FEATURE (340)..(340): Pro or Glu or Leu or Met or Phe or Absent or Asn or Gly or Trp or Thr or Tyr or Arg or Ser or Ala or His or Gln or Lys
  MISC_FEATURE (341)..(341): Lys or Asp or Ala or Gln or Arg or Absent or Val or Gly or Ser or Ile or Glu or Phe or Pro or Asn or Trp or Thr or Met
  MISC_FEATURE (342)..(342): Ile or Glu or Ser or Gln or Pro or Absent or Lys or Arg or Ala or Thr or Asn or Val or Asp or Leu or His
  MISC_FEATURE (343)..(343): Asp or Met or Lys or Gly or Absent or Leu or Pro or Glu or Gln or His or Ser or Val or Ile or Thr or Ala
  MISC_FEATURE (344)..(344): Ile or Val or Thr or Glu or Absent or Asp or Ala or Gln or Lys or Asn or Leu or Arg
  MISC_FEATURE (345)..(345): Gln or Asn or Gly or Ala or Absent or Pro or Lys or Cys or Ser or Thr or Asp or Glu or Val or Leu or His
  MISC_FEATURE (346)..(346): Pro or Gln or Ala or Lys or Absent or Arg or Glu or Ser or Thr or Tyr or Ile or Leu or Asp
  MISC_FEATURE (347)..(347): Glu or Asn or Thr or Asp or Absent or Ser or Arg or Lys or Ala or Gly or Phe or His or Pro
  MISC_FEATURE (348)..(348): Asp or Val or Lys or Absent or Thr or Arg or Gln or Glu
  MISC_FEATURE (349)..(349): Leu or Cys or Ile or Val or Absent or Thr or Pro or Ala or Asp
  MISC_FEATURE (350)..(350): Ala or Cys or Thr or Absent or Leu or Val or Ser or Pro
  MISC_FEATURE (351)..(351): Ser or Ala or Phe or Cys or Absent or Leu or Val or Tyr or Gly or Asn
  MISC_FEATURE (353)..(353): Leu or Pro or Cys or Ser or Absent or Val or Asn or Gly or Ala or Met or Gln
  MISC_FEATURE (361)..(361): Absent or Gly
  MISC_FEATURE (362)..(362): Lys or Leu or Asn or Arg or Absent or Gly or Ala or Ile or Val or Glu or any naturally occurring amino acid or Asp or Thr or Ser or Phe
  MISC_FEATURE (367)..(367): Ala or Met or Absent or Leu or Lys or Gln or Arg or Glu or Val or Ile or Cys
  MISC_FEATURE (371)..(371): Arg or Ala or Tyr or Phe or His or Absent or Gly or Gln or Ile or Ser or Lys or Glu or Asp
  MISC_FEATURE (372)..(372): Gln or Asn or Ala or Gly or Ser or Absent or Val or Cys
  MISC_FEATURE (373)..(373): Phe or Leu or Ile or Val or Absent or Met or His or Tyr or Gln
  MISC_FEATURE (374)..(374): Leu or Val or Ile or Thr or Met or Absent or Ser or Ala or Asn or Cys or Gly
  MISC_FEATURE (375)..(375): Ser or Ala or Cys or Val or Absent or Tyr or Thr or Phe or His or Asn or Gly or Leu
  MISC_FEATURE (376)..(376): Ala or Asn or Gln or Absent or Ser or Cys or Met or Val or Pro
  MISC_FEATURE (377)..(377): Gly or Leu or Cys or Ala or Ile or Val or Absent or Thr or Ser or Asp or Met or Tyr
  MISC_FEATURE (378)..(378): Pro or Cys or Leu or Ile or Val or Absent or Gly or Gln or Thr or Glu or Ala or Arg or Ser or Met or Asp or His
  MISC_FEATURE (379)..(379): Asn or Ser or Gln or Absent or Met or Val or Leu or Ala or Cys or Ile or Gly or His or Phe
  MISC_FEATURE (380)..(380): Ser or Thr or Val or Met or Phe or Trp or Absent or Ala or Ile or His or Gly or Tyr or Leu or Asn or Gln
  MISC_FEATURE (381)..(381): Gly or Leu or Ala or Met or Ser or Absent or Gln or Thr or Ile or Asn or Lys or Val or Trp or Arg
  MISC_FEATURE (382)..(382): Phe or Asp or Absent or Val or Leu or Ser or Ala or Lys or Ile or Arg or Met or His or Asn or Tyr or Cys or Pro or Gln or Thr or Gly
  MISC_FEATURE (383)..(383): Ser or Leu or Absent or Ala or Thr or Asn or Val or Asp or Phe or Met or Ile or Gly or Arg
  MISC_FEATURE (384)..(384): Ile or Val or Thr or Absent or Met or Phe or Gln or Ala or Ser or Asp or Glu or His or Asn or Pro or Leu
  MISC_FEATURE (385)..(385): Ala or Ser or Leu or Absent or Pro or Thr or Asn or Glu or Asp or Gln or Tyr or Gly
  MISC_FEATURE (386)..(386): Arg or Pro or Ala or Absent or Asp or Ser or Ile or Asn or Glu or Leu or Met or Phe or Tyr or His or Gly or Lys
  MISC_FEATURE (387)..(387): Ala or Glu or Ser or Absent or Arg or Leu or Phe or Ile or Met or His or Asn or Asp or Tyr or Val or Gly
  MISC_FEATURE (388)..(388): Tyr or Met or Absent or Val or Ser or Ala or Phe or Leu or Pro or Lys or Ile
  MISC_FEATURE (389)..(389): Val or Absent or Asn or His or Gln or Thr or Asp or Arg or Tyr or Met or Trp
  MISC_FEATURE (390)..(390): Arg or Gly or Absent or Asp or Trp or Pro or Phe or Leu or Met or Ile or Tyr
  MISC_FEATURE (391)..(391): Arg or Absent or Pro or Lys or Val or Asn or Thr or Gly or His or Tyr or Ser
  MISC_FEATURE (392)..(392): Gly or Absent or Leu or Lys or Glu or Pro or Ser or Ala or Asn or His or Thr
  MISC_FEATURE (393)..(393): Leu or Absent or Ile or Gly or Tyr or Ala or Asp or Glu or Lys or Arg or Asn
  MISC_FEATURE (394)..(394): Ala or Absent or Asp or Leu
  MISC_FEATURE (395)..(395): Pro or Absent or Glu or Asp
  MISC_FEATURE (396)..(396): Absent or Asp or Gly
  MISC_FEATURE (397)..(397): Absent or Asn or Gln or Ser or Lys
  MISC_FEATURE (398)..(398): Absent or Trp
  MISC_FEATURE (399)..(399): Absent or Tyr
  MISC_FEATURE (400)..(400): Absent or Ala
  MISC_FEATURE (401)..(401): Absent or Gly
  MISC_FEATURE (402)..(402): Absent or Gly
  MISC_FEATURE (403)..(403): Absent or Arg
  MISC_FEATURE (404)..(404): Absent or Glu
  MISC_FEATURE (405)..(405): Absent or Leu
  MISC_FEATURE (406)..(406): Absent or Leu
  MISC_FEATURE (407)..(407): Absent or Leu
  MISC_FEATURE (408)..(408): Absent or Gly
  MISC_FEATURE (409)..(409): Absent or Tyr
  MISC_FEATURE (410)..(410): Absent or Phe
  MISC_FEATURE (411)..(411): Absent or Thr
  MISC_FEATURE (412)..(412): Absent or Thr
  MISC_FEATURE (413)..(413): Absent or Arg
  MISC_FEATURE (414)..(414): Absent or Val
  MISC_FEATURE (415)..(415): Absent or Ser
  MISC_FEATURE (416)..(416): Absent or Glu
  MISC_FEATURE (417)..(417): Absent or Thr
  MISC_FEATURE (418)..(418): Absent or Trp
  MISC_FEATURE (419)..(419): Absent or Asn
  MISC_FEATURE (420)..(420): Absent or Thr
  MISC_FEATURE (421)..(421): Absent or Ala
  MISC_FEATURE (422)..(422): Absent or Ala
  MISC_FEATURE (423)..(423): Absent or Ala or Val or Thr or Asp or Ile or Asn or Lys or Met or His
  MISC_FEATURE (424)..(424): Absent or His or Ala or Val or Thr or Ile
  MISC_FEATURE (425)..(425): Absent or Asn or His or Tyr or Val or Met or Phe or Gln
  MISC_FEATURE (426)..(426): Absent or Lys or Gly or Asn or Glu or Asp
  MISC_FEATURE (427)..(427): Absent or Val or Leu or Met or Thr or Lys or Gln or Ala or Glu or Ser
  MISC_FEATURE (428)..(428): Absent or Gly or Arg or Asn or Val or Phe or Pro or Met or Glu
  MISC_FEATURE (429)..(429): Absent or Asn or Gly or Arg or Asp or Thr or Tyr or His or Ala
  MISC_FEATURE (430)..(430): Absent or Lys or Asp or Pro or Glu or Ala or Gln or Arg
  MISC_FEATURE (431)..(431): Absent or His or Asp or Tyr or Asn or Lys or Glu or Gln or Ala
  MISC_FEATURE (432)..(432): Absent or Pro or Leu or Ala or Asn or Val or Ser
  MISC_FEATURE (433)..(433): Absent or Thr or Asp or Pro or Gly or Tyr or Leu
  MISC_FEATURE (434)..(434): Absent or Ile or Gln or Pro or Gly or Thr or Lys
  MISC_FEATURE (435)..(435): Absent or Gly or Met or Asp or Val or Pro
  MISC_FEATURE (436)..(436): Pro or Absent or Ala or Gly or Ser or Trp or Gln
  MISC_FEATURE (437)..(437): Thr or Absent or Arg or Ser or Glu or Lys or Leu or Pro or Ala or Gln or Asp or Gly or Asn or His or Phe or Trp
  MISC_FEATURE (438)..(438): Pro or Absent or Gly or Glu or Thr or Ala or Arg or Asn or Asp or Ser or Phe or Trp or His or Lys
  MISC_FEATURE (439)..(439): Gln or Absent or Arg or Pro or Ala or Thr or Gly or Ser or Lys or Asp or Glu or Leu
  MISC_FEATURE (440)..(440): Pro or Absent or Phe or Ser or Arg or Asn or Lys or Gln or Asp or Ala or Glu or His or Leu or Tyr or Met or Cys
  MISC_FEATURE (441)..(441): Asp or Absent or Cys or Trp or Tyr or Phe or Leu or Pro or Ser or Gly or Arg or Lys or Ile or Thr or Glu
  MISC_FEATURE (442)..(442): Asp or Absent or Pro or His or Arg or Ser or Glu or Ala or Ile or Val or Gln or Leu or Gly or Thr
  MISC_FEATURE (443)..(443): Glu or Absent or Gly or Pro or Val or Arg or Ser or Phe or Asp or Thr or Leu or Tyr or Met or Lys or Ala or Gln or Asn
  MISC_FEATURE (444)..(444): Gln or His or Lys or Gly or Absent or Ile or Pro or Thr or Asn or Ala or Ser or Asp or Glu or Arg
  MISC_FEATURE (445)..(445): Ala or Val or Ser or Asp or Absent or Glu or Pro or Asn or Gln or Ile or Thr or Gly or Met
  MISC_FEATURE (447)..(447): Ser or Thr or Ile or Ala or Val or Absent or His or Gln or Glu or Cys or Phe or Gly or Trp or Met or Tyr or Leu
  MISC_FEATURE (450)..(450): Leu or Ala or Val or Absent or Met or Ile or Tyr or Phe or Pro or Thr or Cys
  MISC_FEATURE (453)..(453): Leu or Phe or Gln or Absent or Met or Ser or Thr or Val or Cys or Ala or Pro
  MISC_FEATURE (458)..(458): Gly or Absent or Ala or Ser or Asn or Thr
  MISC_FEATURE (459)..(459): Ile or Leu or Absent or Tyr or Gln or Ala or Thr
  MISC_FEATURE (460)..(460): Gln or Thr or Val or Ser or Absent or Leu or His or Ile or Tyr or Ala or Phe or Met or Gly or Asn or Cys
  MISC_FEATURE (461)..(461): Ser or Gly or His or Thr or Ile or Absent or Leu or Val or Met or Cys or Pro or Lys or Gln or Tyr or Asn
  MISC_FEATURE (462)..(462): Gly or Ile or Gln or Val or Ala or Absent or Asn or Thr or Tyr or Met or Phe or Leu or Ser
  MISC_FEATURE (463)..(463): Absent or Cys or Leu or Thr or Met or Phe or Ser or Ala or Gly or Ile or Val
  MISC_FEATURE (464)..(464): Absent or Cys or His or Met or Tyr or Phe or Ser or Leu or Val or Ile or Thr or Ala or Pro
  MISC_FEATURE (465)..(465): Absent or Ala or Phe or Leu or Asn or Arg or Ser or Cys or Ile or Tyr or Thr or Val or His or Gly or Lys
  MISC_FEATURE (466)..(466): Absent or Thr or Pro or Ser or Leu or Ala or Gly or Met or Cys or Asn or Gln or Phe or Tyr or Ile or Arg
  MISC_FEATURE (467)..(467): Absent or Ile or Asn or Pro or Cys or Val or Phe or Leu or Met or Thr
  MISC_FEATURE (468)..(468): Absent or Arg or Ile or Ser
  MISC_FEATURE (469)..(469): Absent or Lys or Thr
  MISC_FEATURE (470)..(470): Absent or Asp
  MISC_FEATURE (471)..(471): Absent or Pro
  MISC_FEATURE (472)..(472): Absent or Leu
  MISC_FEATURE (473)..(473): Absent or Gly
  MISC_FEATURE (474)..(474): Absent or Leu or Pro or His
  MISC_FEATURE (475)..(475): Absent or Ile or Leu or Thr or Val or Asn or His or Ser
  MISC_FEATURE (476)..(476): Absent or Cys or Ser or Leu or Pro
  MISC_FEATURE (477)..(477): Absent or Leu or Cys or Gly or Val or Ile
  MISC_FEATURE (478)..(478): Absent or Val or Leu or Met or Phe
  MISC_FEATURE (479)..(479): Leu or Absent or His or Phe
  MISC_FEATURE (480)..(480): Cys or Absent or Gln or Leu or Ser or Asn or Ala or Trp or Val
  MISC_FEATURE (481)..(481): Pro or Absent or Gly or Ser or Ala or Thr or Cys or Val or Asp or Tyr
  MISC_FEATURE (482)..(482): Ser or Absent or Phe or Leu or Ala or Pro or Gln or Ile or Thr or Val or Met
  MISC_FEATURE (483)..(483): Val or Absent or Phe or His or Leu or Tyr or Trp or Arg or Ser or Ala or Lys or Gln or Ile or Asn or Met or Thr
  MISC_FEATURE (484)..(484): Leu or Absent or Ala or Ser or Thr or Arg or Asn or Gly or Met or Glu or Val or Ile or Cys or Phe or Lys or His
  MISC_FEATURE (486)..(486): Gly or Lys or Ala or Ile or Met or Absent or Leu or Thr or Val or Asp or Ser or Glu or Asn or Tyr
  MISC_FEATURE (487)..(487): Ser or Gly or Asn or Ala or Absent or Thr or Pro or Arg or Gln or Glu or Val or Lys or Trp or Leu or Tyr or Asp
  MISC_FEATURE (488)..(488): Lys or Val or Asn or Absent or Ile or Leu or Thr or His or Cys or Ala or Glu or Ser or Gly
  MISC_FEATURE (489)..(489): Ile or Val or Tyr or Leu or Ala or Absent or Phe or Thr
  MISC_FEATURE (490)..(490): Val or Ile or Met or His or Tyr or Phe or Absent or Ala or Ser or Leu or Thr
  MISC_FEATURE (491)..(491): Leu or Val or Ile or Thr or Met or His or Phe or Absent or Pro or Cys
  MISC_FEATURE (492)..(492): Met or Leu or Ala or Arg or Pro or Gly or Gln or Thr or Lys or Asn or Ser or Absent or Val
  MISC_FEATURE (493)..(493): Pro or Arg or Lys or Ser or Gln or Gly or Absent or Ala or Asp or Glu or Leu or Asn
  MISC_FEATURE (494)..(494): Lys or Arg or Absent or Phe or Tyr or Trp or Ser or Gly or Thr or Val or Pro
  MISC_FEATURE (496)..(496): Asp or Glu or Thr or Gly or Absent or Ser or Asn or Ala or Lys
  MISC_FEATURE (497)..(497): Leu or Ile or Phe or Val or Met or Absent or Ala or Glu or Pro or Ser or Thr
  MISC_FEATURE (498)..(498): Glu or Arg or Asp or Thr or Lys or Asn or Val or Ile or Absent or Pro or Gln or Gly or Ala or Met or Ser or His or Leu
  MISC_FEATURE (499)..(499): Lys or Ala or Thr or Ser or Asp or Val or His or Gln or Leu or Glu or Gly or Arg or Met or Absent or Pro
  MISC_FEATURE (500)..(500): Ala or Phe or Leu or Met or Tyr or Val or Ile or Arg or Trp or Thr or Ser or Cys or Absent
  MISC_FEATURE (502)..(502): Glu or Asn or Gln or Ala or Lys or Arg or Ser or Asp or Thr or Gly or Absent
  MISC_FEATURE (503)..(503): Leu or Ala or Thr or Ser or Ile or Cys or Gly or Asn or His or Tyr or Lys or Val or Pro or Absent or Met
  MISC_FEATURE (504)..(504): Ile or Leu or Ala or Val or Gln or Thr or Met or Absent
  MISC_FEATURE (506)..(506): Gln or Thr or Glu or Lys or Arg or Asp or Absent or Ala or Asn or Leu
  MISC_FEATURE (507)..(507): His or Asn or Tyr or Leu or Phe or Absent or Arg or Glu or Cys
  MISC_FEATURE (508)..(508): Lys or Glu or Ser or Arg or Asn or Gly or Absent or Gln or Val
  MISC_FEATURE (511)..(511): Val or Phe or Glu or Leu or His or Thr or Ala or Gln or Arg or Ile or Tyr or Ser or Met or Lys or Asn or Asp or Gly
  MISC_FEATURE (512)..(512): Val or Ala or Leu or Trp or Cys or Ile or Met or Phe or Tyr or Ser or Arg or Gly
  MISC_FEATURE (513)..(513): Leu or Pro or Trp or Tyr or Phe or Ala or Ser or Ile or Met or Val or Thr or His or Asn or Arg
  MISC_FEATURE (514)..(514): Gly or Ile or Leu or Val or Met or Cys or Ala or Phe or Gln
  MISC_FEATURE (519)..(519): Val or Ile or Ala or Leu or Phe or Met or Cys
  MISC_FEATURE (520)..(520): Arg or Leu or Ile or Val or His or Ser or Thr or Glu or Asp
  MISC_FEATURE (521)..(521): Glu or Ala or Arg or Leu or Gln or His or Lys or Val or Tyr or Met or Thr or Ser or Absent or Asp
  MISC_FEATURE (522)..(522): Ile or Leu or Phe or Met or Absent
  MISC_FEATURE (523)..(523): Val or Cys or Ser or Ala or Leu or Met or Thr or Ile or Gly or Phe or Absent or Arg
  MISC_FEATURE (525)..(525): Ser or Asn or Asp or Absent or Val or His or Thr or Gln or Phe or Leu or Ala or Tyr
  MISC_FEATURE (526)..(526): Lys or Pro or Absent or Ile or Ser or Gly or Glu or Ala or His or Asp
  MISC_FEATURE (527)..(527): His or Ile or Lys or Absent or Met or Ala or Arg or Phe or Ser or Leu or Val or Gly or Asp or Glu
  MISC_FEATURE (528)..(528): Absent or Val or Leu or any naturally occurring amino acid
  MISC_FEATURE (529)..(529): Absent or Asp or Val or Ile or Thr or Ala or Leu or Pro
  MISC_FEATURE (530)..(530): Absent or Glu or Ala or Lys or Gln or Asp or Gly or Arg or Ser
  MISC_FEATURE (531)..(531): Absent or Phe or Lys or Asn or Pro or Glu or Arg or any naturally occurring amino acid or Ser
  MISC_FEATURE (532)..(532): Absent or Asp or Tyr or any naturally occurring amino acid or Phe or Gly or Asn
  MISC_FEATURE (533)..(533): Absent or Leu or Asp or Ser or Ala or Ile or Val or Lys
  MISC_FEATURE (534)..(534): Absent or Ser or His or Asp or Pro or Lys or Arg
  MISC_FEATURE (535)..(535): Absent or Cys or His or Asp or Tyr or Ser or Arg
  MISC_FEATURE (536)..(536): Absent or Val or Ser or Pro or Gly or Gln or Lys or Tyr or Asp
  MISC_FEATURE (537)..(537): Absent or Gly or Phe or Ala or Glu or Ser or Asp or Pro
  MISC_FEATURE (538)..(538): Absent or Lys or Leu or Val or Ile or Ala or Glu or Arg or Ser or Trp or Asn or Met or Asp or Thr
  MISC_FEATURE (539)..(539): Absent or Tyr or Ser or Lys or Asn or Arg or Ala or Glu or Cys or Thr or Ile or Val or Pro or Phe or Leu
  MISC_FEATURE (540)..(540): Absent or Leu or Asp or Arg or Glu or Lys or Asn or Gly or Ser or Gln or Ala or His
  MISC_FEATURE (541)..(541): Absent or Asp or Arg or Tyr or Ser or Gly or Lys or Asn or Gln or Pro or Met or His
  MISC_FEATURE (542)..(542): Absent or Asp or Ser or Pro or Tyr or Val or His or Arg or Phe or Ala or Asn or Cys
  MISC_FEATURE (543)..(543): Glu or Absent or Leu or Val or Ile or Asp or Ala or Gly or Asn or Tyr
  MISC_FEATURE (544)..(544): Leu or Lys or Arg or Asp or Ser or Tyr or Cys or Gln or Ile or Phe or Met or Val or Absent or Ala
  MISC_FEATURE (547)..(547): Leu or Val or Gly or Ile or Thr or Met or Absent
  MISC_FEATURE (549)..(549): Gly or Ser or Arg or Phe or Tyr or Leu or Lys or Glu or Ala or Cys or Thr or His or Met or Gln or Asp or Trp or Val or Asn or Ile or Absent
  MISC_FEATURE (550)..(550): Leu or Ile or Phe or Ala or Met or Val or Cys or Gly or Absent or Asn or Thr
  MISC_FEATURE (551)..(551): Ser or Met or Leu or Phe or Gly or Tyr or Thr or Ala or Val or Arg or Gln or His or Asn or Ile or Absent or Lys
  MISC_FEATURE (562)..(562): Pro or Leu or Ser or Gln or Asn or Met or Arg or Ala or Gly or Ile or Thr or Val or Absent or Cys or Glu or Phe
  MISC_FEATURE (563)..(563): Glu or Asn or Thr or Arg or Gln or Lys or Ala or Leu or Asp or Ile or Absent or His or Val or Met or Tyr
  MISC_FEATURE (564)..(564): Glu or Leu or Gln or Ser or Ala or Lys or His or Asp or Asn or Absent or Gly or Val or Arg or Thr
  MISC_FEATURE (565)..(565): Ser or Phe or Leu or Met or Val or Ile or Cys or Absent or Ala or Thr or Pro
  MISC_FEATURE (566)..(566): Arg or Glu or Thr or Val or Gln or Phe or Ile or Lys or Ser or Leu or Asn or Ala or Absent or any naturally occurring amino acid or Tyr or Trp or Met or His or Gly
  MISC_FEATURE (567)..(567): Gln or Lys or Asp or Glu or Arg or Thr or Val or Absent or Ala or Gly or any naturally occurring amino acid or Ser or Asn or Leu or Met
  MISC_FEATURE (568)..(568): Lys or Ala or Arg or Leu or Thr or Val or Ile or His or Trp or Absent or Met or Gln or Glu or Cys
  MISC_FEATURE (569)..(569): Phe or Leu or His or Tyr or Lys or Trp or Ile or Val or Absent or Asn or Arg or Ser or Cys or Thr or Met
  MISC_FEATURE (571)..(571): Ser or Asp or Gly or Absent or Lys or Pro or Leu or Ala or Val or Cys or Ile or Met or Asn or Arg or Gln
  MISC_FEATURE (572)..(572): Met or Absent or Asn or Arg or Thr or Pro or Gly or Ala or Val
  MISC_FEATURE (573)..(573): Leu or Absent or Pro or Lys or Thr or Ala or Ile or Val or Glu or any naturally occurring amino acid
  MISC_FEATURE (574)..(574): Ile or Absent or Gln or Glu or Arg or Asp or Phe or Ser or Lys or Leu
  MISC_FEATURE (575)..(575): Gly or Absent or Gln or Thr or Arg or Ser
  MISC_FEATURE (576)..(576): Absent or Ile or Asn or Thr or Val or Glu or Gln
  MISC_FEATURE (577)..(577): Absent or Arg or Leu or Ser or Asn or Val
  MISC_FEATURE (578)..(578): Absent or His or Asp or Pro or Glu
  MISC_FEATURE (579)..(579): Absent or Ser or Asn or Tyr or Glu or Phe or Thr
  MISC_FEATURE (580)..(580): Absent or Gln or Gly or Asn or Ser
  MISC_FEATURE (581)..(581): Absent or Ser
  MISC_FEATURE (582)..(582): Absent or Gly
  MISC_FEATURE (583)..(583): Absent or Arg or Met
  MISC_FEATURE (584)..(584): Absent or Pro or Asp or Arg or Ser or Gly
  MISC_FEATURE (585)..(585): Absent or Gln or Pro or Lys or Arg or His or Thr or Gly
  MISC_FEATURE (586)..(586): Absent or Val or Leu or Ile
  MISC_FEATURE (587)..(587): Absent or Arg or Thr or Val or Ala or Lys
  MISC_FEATURE (588)..(588): Absent or Val or Ile or Leu or Lys
  MISC_FEATURE (589)..(589): Absent or Val or Ser or Ile or His or Tyr or Thr or Asn or Gln
  MISC_FEATURE (590)..(590): Absent or Gln or Gly
  MISC_FEATURE (591)..(591): Absent or Gly or Ala or Met or Gln
  MISC_FEATURE (592)..(592): Absent or Asp or Arg or Asn or Gln or Thr or Ser or Lys or Glu or His or Gly or Pro
  MISC_FEATURE (593)..(593): Absent or Val or Thr or Leu or Ala or Ser or Ile or Trp or Phe or Met
  MISC_FEATURE (594)..(594): Absent or Gln or Gly or Asp or His or Val or Lys or Leu or Arg or Ile or Thr or Glu or Ala or Phe or Asn or Tyr
  MISC_FEATURE (595)..(595): Absent or Val or Phe or Trp or Ile or Ser or Thr or Leu
  MISC_FEATURE (596)..(596): Absent or Gln or Lys or Gly or Thr or Ser or Arg or Cys or Ala or Val or Met or Leu or Ile
  MISC_FEATURE (597)..(597): Absent or Glu or Gln or Asp or Leu or Asn
  MISC_FEATURE (598)..(598): Absent or Ala or Gly or Cys or Trp
  MISC_FEATURE (599)..(599): Absent or Ser or Tyr or Phe or Ala
  MISC_FEATURE (600)..(600): Absent or Gly or Leu
  MISC_FEATURE (601)..(601): Absent or Glu or Met or Ala or Leu or Cys or Asn
  MISC_FEATURE (602)..(602): Absent or Phe or Trp
  MISC_FEATURE (603)..(603): Absent or Leu or Phe
  MISC_FEATURE (604)..(604): Absent or Ser or Ile
  MISC_FEATURE (605)..(605): Absent or Ile or Arg
  MISC_FEATURE (606)..(606): Absent or Pro or Lys
  MISC_FEATURE (607)..(607): Absent or Ile or Leu
  MISC_FEATURE (608)..(608): Absent or Asn or Val
  MISC_FEATURE (609)..(609): Absent or Ala or Leu
  MISC_FEATURE (610)..(610): Absent or Lys or Ser or Leu
  MISC_FEATURE (611)..(611): Absent or Ser or Asp or Ile
  MISC_FEATURE (612)..(612): Absent or Thr or Leu or Glu
  MISC_FEATURE (613)..(613): Absent or Ser or Phe or Cys
  MISC_FEATURE (614)..(614): Absent or Ala or Gly or Met
  MISC_FEATURE (615)..(615): Absent or Pro or Ser or Gln
  MISC_FEATURE (616)..(616): Absent or Val or Ile or Asn
  MISC_FEATURE (617)..(617): Absent or Val or Trp or Pro
  MISC_FEATURE (618)..(618): Absent or Leu or Tyr or Ser
  MISC_FEATURE (619)..(619): Absent or Val or Ile or Pro
  MISC_FEATURE (620)..(620): Absent or Gln or Pro or Cys
  MISC_FEATURE (621)..(621): Absent or Lys or Thr or Ser
  MISC_FEATURE (622)..(622): Absent or Lys or Val or Asp
  MISC_FEATURE (623)..(623): Absent or Leu
  MISC_FEATURE (624)..(624): Absent or Pro or Asp or Leu
  MISC_FEATURE (625)..(625): Absent or Gln or Ser or Met
  MISC_FEATURE (626)..(626): Absent or Val or Arg or Asn
  MISC_FEATURE (627)..(627): Absent or His or Gly or Asn
  MISC_FEATURE (628)..(628): Absent or Ser or Val
  MISC_FEATURE (629)..(629): Absent or Tyr or Gln or Gly
  MISC_FEATURE (630)..(630): Absent or Met or Ala or Leu
  MISC_FEATURE (631)..(631): Absent or Tyr or Phe or Asn
  MISC_FEATURE (632)..(632): Gln or Absent or Phe or Leu or Ser or His or Arg
  MISC_FEATURE (633)..(633): Gly or Absent or His or Ala or Ser
  MISC_FEATURE (634)..(634): Tyr or Absent or Pro or Trp or Cys or Thr
  MISC_FEATURE (636)..(636): Ser or Met or Leu or Absent or Tyr
  MISC_FEATURE (639)..(639): Val or His or Ser or Thr or Met or Cys or Ala or Absent or Tyr or Leu or Gln
  MISC_FEATURE (640)..(640): Asn or Ser or Absent or Cys or Thr or Gly or Phe or Ala
  MISC_FEATURE (641)..(641): Gly or Absent or Ser or Thr or Pro or Ile or Val or Phe or Arg
  MISC_FEATURE (642)..(642): Absent or Val or Thr or Ala or Leu or Ser
  MISC_FEATURE (643)..(643): Absent or Asp
  MISC_FEATURE (644)..(644): Absent or Phe
  MISC_FEATURE (645)..(645): Absent or Asp
  MISC_FEATURE (646)..(646): Absent or Cys
  MISC_FEATURE (647)..(647): Absent or Glu or Cys or Thr or Ser or Leu
  MISC_FEATURE (648)..(648): Absent or Cys or Thr or Val or Ile or Ala or Glu or Ser or Leu or Pro or Gly
  MISC_FEATURE (649)..(649): Absent or Ser or Thr or Ala or Met or Cys or Ile or Phe or Gly or Val or Pro or Leu or Trp
  MISC_FEATURE (650)..(650): Absent or Cys or Met or Leu or Ala or Ser or Thr or Val or His or Pro or Ile or Gly or Phe or Arg
  MISC_FEATURE (651)..(651): Ala or Cys or Ile or Phe or Val or Gln or Thr or Ser or Absent or Leu or Met or His or Asn or Arg
  MISC_FEATURE (652)..(652): Ala or Ile or Val or Pro or Ser or Asp or Asn or His or Absent or Cys or Thr or Gln or Phe or Leu
  MISC_FEATURE (653)..(653): Ser or Thr or Ala or Val or Ile or Pro or Tyr or Asp or Glu or Gly or Cys or Absent or Leu or Lys or Arg or Met
  MISC_FEATURE (654)..(654): Gly or Leu or His or Cys or Glu or Ser or Asp or Asn or Lys or Pro or Ala or Val or Met or Thr or Absent or Trp
  MISC_FEATURE (655)..(655): Leu or Ser or Pro or Glu or Gln or Asn or Val or Asp or Gly or His or Phe or Cys or Absent or Tyr or Ile or Thr or Lys
  MISC_FEATURE (656)..(656): Ala or His or Pro or Arg or Lys or Ile or Thr or Leu or Val or Tyr or Asp or Asn or Absent or Trp or Gly or Ser or Glu
  MISC_FEATURE (657)..(657): Ser or Gly or Absent or Arg or Ile or Leu or Glu or Trp or Phe or Asp or Met or Pro or Lys or Asn
  MISC_FEATURE (658)..(658): Asp or Lys or Absent or His or Gly or Ala or Leu or Glu or Ser or Asn or Met or Ile or Pro or Arg or Val or Gln
  MISC_FEATURE (659)..(659): Asp or Gln or Tyr or Absent or Lys or Ser or Trp or Val or Gly or Leu or Arg or Asn or Thr or Met or Glu or Pro
  MISC_FEATURE (660)..(660): Tyr or His or Ala or Absent or Leu or Pro or Asp or Lys or Gln or Asn or Glu or Met or Gly or Ser or Phe or Arg or Ile or Val or Thr or Trp
  MISC_FEATURE (661)..(661): Leu or Thr or Tyr or Absent or Lys or His or Asp or Glu or Asn or Val or Ile or Ala or Gly or Gln or Pro or Arg or Phe or Met or Ser
  MISC_FEATURE (662)..(662): Ala or Lys or Gly or Absent or Leu or Val or Arg or Ile or Gln or Glu or Thr or Ser or Cys or Asn or His
  MISC_FEATURE (663)..(663): Arg or Lys or Tyr or Val or Pro or Absent or His or Asp or Asn or Ala or Gln or Glu or Thr or Leu or Ser
  MISC_FEATURE (664)..(664): Pro or Arg or Ala or Met or Leu or Val or Ile or Thr or Tyr or Phe or Ser or Absent or Lys or Asn
  MISC_FEATURE (665)..(665): Thr or Asn or Asp or Gly or Lys or Arg or Met or Val or Absent or Ser or Ala
  MISC_FEATURE (666)..(666): Ser or Arg or Gly or Thr or Leu or Ala or Absent or any naturally occurring amino acid or Lys or Asp or Glu
  MISC_FEATURE (667)..(667): Ala or Val or Ser or Thr or Ile or Cys or Absent or Leu or Gly
  MISC_FEATURE (668)..(668): Gly or Asn or Absent or Leu or Val
  MISC_FEATURE (669)..(669): Arg or Phe or Thr or Ile or His or Gln or Val or Cys or Ala or Ser or Lys or Absent or Met or Pro or Glu or Leu or Asn
  MISC_FEATURE (670)..(670): Ala or Ile or Leu or Asp or Absent or Met or Pro or Val or Gly or Asn
  MISC_FEATURE (671)..(671): Pro or Leu or Val or Ile or Met or Thr or Cys or Absent or Ala or any naturally occurring amino acid or Asn or His
  MISC_FEATURE (672)..(672): Pro or Gly or Ser or Absent or Ala or Trp or Glu or Thr or Arg
  MISC_FEATURE (673)..(673): Thr or Asn or Ser or Gly or His or Absent or Asp or Ala
  MISC_FEATURE (674)..(674): Ile or Leu or Thr or Val or Met or Ala or Cys or Ser or Absent or Tyr or Arg or Lys
  MISC_FEATURE (675)..(675): Glu or Lys or Thr or Val or Asp or Gln or Arg or Absent or Ser or Leu or Ile or Tyr
  MISC_FEATURE (676)..(676): Ile or Val or Leu or Ala or Cys or Absent or any naturally occurring amino acid or Gly or Met
  MISC_FEATURE (677)..(677): Arg or Lys or Absent or Gln or Met or Leu or Ala or Thr
  MISC_FEATURE (678)..(678): Ile or Phe or Val or Absent or Leu or Asn or Ala or Ser or Met
  MISC_FEATURE (679)..(679): Ile or Val or Leu or Absent or Met or Ala or Pro
  MISC_FEATURE (680)..(680): Asp or Lys or Gly or Arg or Thr or Absent or Ala or Ser or Asn or Met or Glu or Val or His
  MISC_FEATURE (681)..(681): Pro or Ile or Ser or Phe or Ala or Glu or Asp or Absent or Gln or Thr or His or Val or Leu or Gly or Met or Asn or Arg
  MISC_FEATURE (682)..(682): Asp or Glu or Asn or Absent or His or Val or Lys or Gly or Ser or Leu or Ile
  MISC_FEATURE (683)..(683): Thr or Absent or Ser or Gly or Glu or Val or Pro or Gln
  MISC_FEATURE (684)..(684): Absent or Val or Asn or Asp or Tyr or Pro or Ser or Glu or Gly or Arg
  MISC_FEATURE (685)..(685): Absent or Asp or Ala or Thr or Lys or Val or Pro or Glu or Asn or Arg or Phe or Cys or Leu or Ser
  MISC_FEATURE (686)..(686): Absent or Gln or Val or Ser or Thr or Pro or Ala or Lys or Ile
  MISC_FEATURE (687)..(687): Absent or Pro or Ala or Lys or Gly or Thr or Glu or Val or Leu
  MISC_FEATURE (688)..(688): Absent or Ala or Gln or Arg or Ser or Gly or Val or Lys or Pro or Asp
  MISC_FEATURE (689)..(689): Absent or Tyr or Leu or Ser or Val or Phe or Cys or Thr
  MISC_FEATURE (690)..(690): Absent or Ser or Lys or His or Glu or Asn or Asp or Ala
  MISC_FEATURE (691)..(691): Absent or Gly or Leu or Trp or Val or Glu or Thr
  MISC_FEATURE (692)..(692): Absent or Asp or Ser or Thr or Lys
  MISC_FEATURE (693)..(693): Absent or Asp or Phe
  MISC_FEATURE (694)..(694): Absent or Leu or Val or Thr or Ala or Pro
  MISC_FEATURE (695)..(695): Absent or Ser or Thr or Arg or Asp or Ala or Asn
  MISC_FEATURE (696)..(696): Absent or Val or His or Pro or Gly or Ala or Lys or Ser or Glu or Gln or Leu
  MISC_FEATURE (697)..(697): Absent or Ser or Leu or Ile or Asp or Gly or Val or Asn or His or Glu
  MISC_FEATURE (698)..(698): Absent or Asp or Gly or Glu
  MISC_FEATURE (699)..(699): Absent or Val or Gly or Ala or Asp or Glu or Ser
  MISC_FEATURE (700)..(700): Absent or Gly or Asn or Ala or Met or Glu or Lys or Val or Thr or Leu
  MISC_FEATURE (701)..(701): Leu or Gly or Ser or Lys or Val or Asn or Arg or Absent or Phe or Ile or Glu or Thr or Gln
  MISC_FEATURE (702)..(702): Thr or Arg or Lys or Asn or Ser or Glu or Absent or Ile or Gln or Pro
  MISC_FEATURE (703)..(703): Glu or Ser or Asp or Leu or Thr or Ile or Val or Lys or Arg or Absent or Ala or Gln or Cys or His or Pro or Tyr
  MISC_FEATURE (704)..(704): Val or Leu or Cys or Ala or Gly or Thr or Asp or Absent or Gln or Asn
  MISC_FEATURE (705)..(705): Ala or Pro or Glu or Gly or Lys or Ser or Asp or Thr or Absent or Arg or His or Gln or Asn or Val or Ile or Tyr
  MISC_FEATURE (706)..(706): Asn or Lys or Val or Tyr or His or Glu or Phe or Arg or Pro or Absent or Ala or Gly or Thr or Ile or Asp
  MISC_FEATURE (707)..(707): Gly or Asn or Asp or Glu or Leu or Absent or Ile or Met or Gln or Lys
  MISC_FEATURE (708)..(708): Lys or Glu or Ser or Thr or Gln or Pro or Absent or Ala or Val or Arg
  MISC_FEATURE (709)..(709): Thr or Pro or Leu or Arg or Val or His or Glu or Ser or Absent or Gln or Gly
  MISC_FEATURE (710)..(710): Gly or Absent or Glu
  MISC_FEATURE (711)..(711): Glu or Absent or Leu or Ile or Asn
  MISC_FEATURE (712)..(712): Ile or Leu or Val or Absent or Phe or Met or Cys
  MISC_FEATURE (713)..(713): Trp or Cys or Phe or Leu or Val or Tyr or Absent or Met or Ile
  MISC_FEATURE (714)..(714): Val or Ala or Leu or Ile or Absent or Ser or Gly or Arg
  MISC_FEATURE (715)..(715): Arg or Lys or Ala or Thr or Ser or Gln or Absent or Gly or any naturally occurring amino acid
  MISC_FEATURE (716)..(716): Gly or Ser or Thr or Ala or Absent or Pro
  MISC_FEATURE (717)..(717): Pro or Gln or Absent or Arg or Asp or Tyr or Glu or His or Ser
  MISC_FEATURE (718)..(718): Asn or Cys or Gln or Absent or Ser or Ala or Thr or Met or His or Gly or Ile
  MISC_FEATURE (719)..(719): Val or Met or Ile or Absent or Leu
  MISC_FEATURE (720)..(720): Ala or Met or Thr or Absent or Ser or Val or Leu or Phe or His or Gln
  MISC_FEATURE (721)..(721): Leu or Lys or Met or Absent or Gln or Ile or Asp or Pro or Ser or Ala or Arg or Thr
  MISC_FEATURE (722)..(722): Gly or Absent or Arg or Asp or Ala or Glu
  MISC_FEATURE (723)..(723): Tyr or Absent or Ala
  MISC_FEATURE (724)..(724): Trp or Tyr or Leu or Thr or Absent or Ala or His or Phe or Val or Met or Ile
  MISC_FEATURE (725)..(725): Gly or Lys or Asn or Absent or Ser or His or Glu or Arg or Pro or Ala or Asp
  MISC_FEATURE (726)..(726): Lys or Asn or Absent or Asp or Thr or Val or His
  MISC_FEATURE (727)..(727): Lys or Glu or Pro or Absent or Asp or Ala or Arg or Cys or Val or Gln or Gly or Leu or Ser
  MISC_FEATURE (728)..(728): Ala or Phe or Lys or Gln or Absent or Glu or Leu or Ser or Asn or Gly or Met or Asp
  MISC_FEATURE (729)..(729): Ala or Absent or Ser or Gly or Leu or Phe or Lys
  MISC_FEATURE (730)..(730): Thr or Absent or Ser or Asn or Gly or Arg
  MISC_FEATURE (731)..(731): Absent or Ser or Glu or Arg or Ala or Gln or Thr or Asn
  MISC_FEATURE (732)..(732): Absent or Glu or Asp or Ala or Leu or Pro
  MISC_FEATURE (733)..(733): Absent or Thr or Ala
  MISC_FEATURE (734)..(734): Absent or Leu or Thr or Met
  MISC_FEATURE (735)..(735): Absent or Cys or Asp or Arg or Ala or Ile or Ser or Thr or Gln or Lys
  MISC_FEATURE (736)..(736): Absent or Arg or Ala or Glu or Asp or Ser or Thr
  MISC_FEATURE (737)..(737): Absent or Met
  MISC_FEATURE (738)..(738): Absent or Gln
  MISC_FEATURE (739)..(739): Absent or Cys
  MISC_FEATURE (740)..(740): Absent or Lys
  MISC_FEATURE (741)..(741): Absent or Arg
  MISC_FEATURE (742)..(742): Absent or Tyr
  MISC_FEATURE (743)..(743): Absent or Lys
  MISC_FEATURE (744)..(744): Absent or Asp
  MISC_FEATURE (745)..(745): Absent or Phe
  MISC_FEATURE (746)..(746): Absent or Ile
  MISC_FEATURE (747)..(747): Absent or Tyr
  MISC_FEATURE (748)..(748): Absent or Cys
  MISC_FEATURE (749)..(749): Absent or Ala
  MISC_FEATURE (750)..(750): Absent or Val
  MISC_FEATURE (751)..(751): Absent or His
  MISC_FEATURE (752)..(752): Absent or Cys
  MISC_FEATURE (753)..(753): Absent or Pro
  MISC_FEATURE (754)..(754): Absent or any naturally occurring amino acid
  MISC_FEATURE (755)..(755): Absent or Trp
  MISC_FEATURE (756)..(756): Absent or Tyr
  MISC_FEATURE (757)..(757): Absent or Lys or Ser
  MISC_FEATURE (758)..(758): Absent or Trp or Met or Gly
  MISC_FEATURE (759)..(759): Absent or Lys or Glu or Ala or Gln
  MISC_FEATURE (760)..(760): Absent or Leu or Thr or Lys or Glu
  MISC_FEATURE (761)..(761): Absent or Ala or Ser or Cys or Ile or Pro
  MISC_FEATURE (762)..(762): Absent or Phe or Leu or Asp
  MISC_FEATURE (763)..(763): Absent or Val or Asp or Glu or Pro or Met or Lys
  MISC_FEATURE (764)..(764): Absent or Glu or Arg or Gly or Pro or Tyr or Asp or Lys or Trp or Ile or Ser or Gln
  MISC_FEATURE (765)..(765): Absent or Glu or Ala or Ser or Val
  MISC_FEATURE (766)..(766): Absent or Thr or Asn or Gln or Asp or Ser
  MISC_FEATURE (767)..(767): Absent or Cys or Gln or Lys or Glu or Arg or Ala or Val or Ser or Asp or Tyr or Asn
  MISC_FEATURE (768)..(768): Absent or Leu or Asp or Glu or Thr or Lys or Ala or Ser or Trp or Tyr or Phe or Asn
  MISC_FEATURE (769)..(769): Absent or Thr or Ser or Pro or Ala or Glu or Cys
  MISC_FEATURE (770)..(770): Absent or Ile or Phe or Tyr or Lys or Glu or Thr or Pro or Ala or Ser or Met or Val or Leu
  MISC_FEATURE (771)..(771): Absent or Asp or Leu or Val or Ile or Thr or Gly or Asn or Ser or Phe
  MISC_FEATURE (772)..(772): Glu or Lys or Pro or Absent or Asp or Val or Trp or His or Tyr or Leu or Met or Thr or Arg or Ala
  MISC_FEATURE (773)..(773): Glu or Asp or Absent or Ser or Gly or Arg or His or Val or Ile or Gln or Pro or Ala or Lys
  MISC_FEATURE (774)..(774): Ala or Gly or Absent or Ile or Asn or Glu or Asp or His or Cys or Trp or Tyr or Phe or Ser or Arg or Thr
  MISC_FEATURE (775)..(775): Phe or Absent or Asp or Thr or Tyr or Trp or Leu or Met or Val or Ile or Glu or Ala
  MISC_FEATURE (776)..(776): Thr or Absent or Asp or Gly or Asn or Gln or His or Lys or Met or Ser or Glu
  MISC_FEATURE (777)..(777): Lys or Absent or Pro or Arg or Thr or Asp or Ala or Glu or Gly or Leu or Val or Ser
  MISC_FEATURE (778)..(778): Asp or Absent or Gly or Thr or Lys or Glu or Arg or His or Gln or Ser or Val
  MISC_FEATURE (779)..(779): Gly or Absent or Arg or Lys or Ile or Leu
  MISC_FEATURE (780)..(780): Phe or Trp or Absent or Tyr
  MISC_FEATURE (781)..(781): Phe or Leu or Absent or Val or Met or Ile
  MISC_FEATURE (782)..(782): Arg or Gln or His or Absent or Lys
  MISC_FEATURE (783)..(783): Thr or Ser or Absent or Ala
  MISC_FEATURE (784)..(784): Gly or Absent
  MISC_FEATURE (785)..(785): Asp or Absent
  MISC_FEATURE (786)..(786): Leu or Ile or Glu or Absent or Gln or Lys or Val or Met
  MISC_FEATURE (787)..(787): Gly or Val or Absent or Cys or Phe or Ala or Leu
  MISC_FEATURE (788)..(788): Arg or Tyr or Lys or Absent or Thr or Val or Leu or Ile or Met or Phe or any naturally occurring amino acid or Ala
  MISC_FEATURE (789)..(789): Lys or Ile or Absent or Val or Phe or Met or Tyr or Leu or Arg or Glu or Gln
  MISC_FEATURE (790)..(790): Glu or Asp or Asn or Ser or Absent or Lys or Cys or Arg or Thr or Phe
  MISC_FEATURE (791)..(791): Asp or Glu or Arg or Absent or Lys or Leu or Val or Ser or Gln or Thr or Asn or Ala or Pro
  MISC_FEATURE (792)..(792): Asp or Glu or Gln or Absent or His or Ala or Gly or Asn or Ser or Leu or Lys or Phe or Tyr or Arg or Met
  MISC_FEATURE (793)..(793): Gly or Absent or Glu or Pro or Asp or Gln or Ala or Lys or Thr or Asn
  MISC_FEATURE (794)..(794): Absent or Ile or Asn or Lys or Ser or Arg or Gln or Pro or Phe or Tyr or Glu or Asp
  MISC_FEATURE (795)..(795): Absent or Gly or Leu or Phe or Cys or Val or Ile
  MISC_FEATURE (796)..(796): Absent or Asn or Ile or Phe or Thr or His
  MISC_FEATURE (797)..(797): Absent or Gly or Glu or Asp or Ala or Thr or Asn or Lys
  MISC_FEATURE (798)..(798): Phe or Asp or Absent or Asn or His or Arg or Gln or Lys or Leu or Ile or Trp or Glu or Tyr
  MISC_FEATURE (799)..(799): Ile or Leu or Absent or Val or Phe or Tyr
  MISC_FEATURE (800)..(800): Tyr or Phe or Ala or Absent or Thr or Trp or Val or Met or Gln or Leu or His or Cys or Arg or Ser
  MISC_FEATURE (801)..(801): Val or Leu or Ile or Absent or Phe or Cys
  MISC_FEATURE (802)..(802): Met or Val or Thr or Absent or Leu or Ala
  MISC_FEATURE (803)..(803): Asp or Absent or Glu or Gly
  MISC_FEATURE (804)..(804): Arg or Absent
  MISC_FEATURE (805)..(805): Ser or Ile or Leu or Absent or Ala or Thr or Asn or Val or Lys or Arg or Phe
  MISC_FEATURE (806)..(806): Lys or Absent or Glu
  MISC_FEATURE (807)..(807): His or Glu or Absent or Asp
  MISC_FEATURE (808)..(808): Ile or Leu or Met or Absent or Val or Thr
  MISC_FEATURE (809)..(809): Ile or Absent or Met or Leu
  MISC_FEATURE (810)..(810): Ile or Lys or Absent or Glu or any naturally occurring amino acid
  MISC_FEATURE (811)..(811): Arg or Tyr or Val or Absent or Ser or Phe
  MISC_FEATURE (812)..(812): Gly or Lys or Absent or Arg or Asn or Ser or Met or Gln
  MISC_FEATURE (813)..(813): Gly or Absent or Ser or Ala
  MISC_FEATURE (814)..(814): Glu or Phe or Ile or Absent or Ala or Leu or His or Lys or Arg or Met or Asn or Tyr
  MISC_FEATURE (815)..(815): Asn or Gln or Gly or Asp or Leu or Ala or Absent
  MISC_FEATURE (816)..(816): Ile or Val or Glu or Absent
  MISC_FEATURE (817)..(817): Ser or Ala or Phe or Lys or Pro or Absent or Tyr
  MISC_FEATURE (818)..(818): Gly or Pro or Phe or Absent
  MISC_FEATURE (819)..(819): Thr or Ala or Ile or Ser or Val or Absent or Leu
  MISC_FEATURE (820)..(820): Glu or Asp or Ser or Absent
  MISC_FEATURE (821)..(821): Val or Leu or Arg or Met or Ile or Absent
  MISC_FEATURE (822)..(822): Glu or Leu or Gly or Absent
  MISC_FEATURE (823)..(823): Thr or Gly or Asn or Lys or Ala or Gln or Asp or Ser or Absent or Glu
  MISC_FEATURE (824)..(824): Ala or Ile or Leu or Glu or Phe or Cys or His or Met or Val or Absent or Thr or Arg
  MISC_FEATURE (825)..(825): Ile or Leu or Pro or Met or Absent
  MISC_FEATURE (826)..(826): Tyr or Leu or Gln or Ile or Pro or Phe or Absent or Val or Cys or Thr or Met
  MISC_FEATURE (827)..(827): Ser or Thr or Gly or Lys or Leu or Asp or Glu or Ala or Asn or Absent
  MISC_FEATURE (828)..(828): Glu or His or Gln or Met or Ile or Leu or Asn or Absent or Arg or Ala or Ser
  MISC_FEATURE (829)..(829): Arg or Pro or Ser or Thr or Asp or Ala or Absent or Glu or Gln
  MISC_FEATURE (830)..(830): Absent or Asp
  MISC_FEATURE (831)..(831): Absent or His
  MISC_FEATURE (832)..(832): Arg or Ser or Gln or Val or Ala or Asp or Leu or Phe or Tyr or His or Met or Absent or Glu or Lys or Asn or Cys
  MISC_FEATURE (833)..(833): Ile or Val or Absent
  MISC_FEATURE (834)..(834): Ile or Glu or Asp or Ala or Absent or Ser or Gly or Phe or Lys or Asn or Val or Met or Leu or Arg or Thr
  MISC_FEATURE (835)..(835): Asp or Ala or Absent or Ser or Asn or Glu or Arg
  MISC_FEATURE (836)..(836): Cys or Ala or Val or Absent or Ser or Thr
  MISC_FEATURE (837)..(837): Thr or Ala or Absent or Cys or Val or Gly or Ile
  MISC_FEATURE (838)..(838): Ala or Val or Absent or Ile
  MISC_FEATURE (839)..(839): Val or Cys or Absent or Leu or Ala or Thr or Ile or Phe
  MISC_FEATURE (840)..(840): Pro or Gly or Absent or Ser or Ala or Gln
  MISC_FEATURE (841)..(841): Ile or Leu or Absent or Val or Lys or Arg or Phe or Tyr or Gln or Met
  MISC_FEATURE (842)..(842): Pro or Absent or Ala or Ser or Gln or Val or Glu or Asn or Thr or His or Trp or Met or Tyr or Leu or Asp or Lys or Ile
  MISC_FEATURE (843)..(843): Asp or Absent or Gly or Asn or Ser or Gln or Val or Lys or Cys or Glu
  MISC_FEATURE (844)..(844): Absent or Arg or Gly or Asp or Ala or Lys or Glu
  MISC_FEATURE (845)..(845): Absent or Thr or Glu or His or Val or Gln or Ala
  MISC_FEATURE (846)..(846): Absent or Asp or Met or Leu or His or Tyr or Ala
  MISC_FEATURE (847)..(847): Absent or Ala or His or Gly
  MISC_FEATURE (848)..(848): Absent or Ser
  MISC_FEATURE (849)..(849): Absent or His
  MISC_FEATURE (850)..(850): Absent or Trp or Tyr
  MISC_FEATURE (851)..(851): Absent or Cys or Leu
  MISC_FEATURE (852)..(852): Absent or Ser or Asp or Glu or Gln or Gly or Lys or Leu or Pro or Val or Asn or Ala
  MISC_FEATURE (853)..(853): Gln or Glu or Absent or Phe or Tyr or Arg or Gly or Ser or Ala or Asp or Ile or Lys or Thr
  MISC_FEATURE (854)..(854): Arg or Glu or Absent or Cys or Ser or Gly or Thr or Ala or Lys or Asn or Asp or Gln
  MISC_FEATURE (855)..(855): Phe or Ala or Absent or Gly or Thr or Ser or Glu or Asn or Asp or Met
  MISC_FEATURE (856)..(856): Gly or Absent or Glu or Asp or Thr or Asn
  MISC_FEATURE (857)..(857): Glu or Absent
  MISC_FEATURE (858)..(858): Thr or Ile or Arg or Absent or Lys or Gln or Ser or Ala or Val or Phe or Tyr or Trp or Leu
  MISC_FEATURE (859)..(859): Val or Pro or Absent or Leu or Arg or Ile or Ala
  MISC_FEATURE (860)..(860): Gly or Val or Lys or Absent or Pro or Arg or Ile or Cys
  MISC_FEATURE (861)..(861): Val or Ala or Absent or Leu or Trp or Arg or Gln or Lys or Ser or Thr or Glu
  MISC_FEATURE (862)..(862): Val or Trp or Phe or Absent or Ala or Tyr or Cys or Glu or Ile
  MISC_FEATURE (863)..(863): Cys or Val or Absent or Phe or Tyr or Trp or Ile or Leu or Pro
  MISC_FEATURE (864)..(864): Val or Absent or Ile or Ala or Gln or Arg or Pro or Gly
  MISC_FEATURE (865)..(865): Pro or Leu or Absent or Ala or Val or Thr or Arg or Lys or His
  MISC_FEATURE (866)..(866): Arg or Asn or Lys or Absent or Leu or Pro or Glu or Gln or Ser or Thr or Ala or His or Phe
  MISC_FEATURE (867)..(867): Ala or Ser or Absent or Thr or Pro or Asn or Asp or Gly or Lys or Tyr or Phe or Leu or Val
  MISC_FEATURE (868)..(868): Glu or Lys or Ser or Absent or Pro or Ala or Arg or Asp or Gln or His or Gly or Asn or Leu or Val or Ile
  MISC_FEATURE (869)..(869): Tyr or Ala or His or Absent or Ser or Lys or Pro or Val or Glu or Gln or Asp or Gly or Leu or Thr or Arg
  MISC_FEATURE (870)..(870): Gln or Lys or Ala or Absent or Val or Thr or Pro or Arg or Ser or Glu or Leu or Ile
  MISC_FEATURE (871)..(871): Lys or Glu or Ser or Absent or Ala or Thr or Gly or Cys or Val or Tyr or Phe or Leu or Ile or Asn or Gln or Pro or Asp
  MISC_FEATURE (872)..(872): Gln or Ser or Arg or Absent or Thr or Glu or Gly or Tyr or Asp or Lys or His or Ala or Asn or Leu or Pro
  MISC_FEATURE (873)..(873): Asn or Glu or Pro or Absent or Arg or Asp or Ala or Val or Gln or Lys or Ser or His or Gly
  MISC_FEATURE (874)..(874): Arg or Glu or Val or Absent or Ala or Ile or Leu or Thr or Gln or Lys or Asn or Pro or Trp or Asp or Met or Ser
  MISC_FEATURE (875)..(875): Pro or Asp or Glu or Absent or Gly or Leu or Val or Arg or Ser or Thr or Ala or Ile or Lys or Cys or Gln
  MISC_FEATURE (876)..(876): Thr or Ile or Ala or Absent or Lys or Asn or Asp or Gly or Tyr or Glu or Val or Ser or Leu or Pro
  MISC_FEATURE (877)..(877): Glu or Ile or Ala or Absent or Asp or Asn or Lys or Leu or Gly or Ser or Val or Gln or Thr or Pro or Cys or Arg
  MISC_FEATURE (878)..(878): Gln or Asn or Arg or Absent or Pro or Glu or Ala or Lys or Ser or Gly or Leu or Thr or Asp or Met or Phe
  MISC_FEATURE (879)..(879): Asp or Tyr or Glu or Absent or Met or Val or Arg or Leu or Ile or Lys or Thr or Ala or Gln or His or Phe
  MISC_FEATURE (880)..(880): Val or Ile or Absent or Glu or Lys or Gly or Pro or Asp or Ser or Trp or Leu or Phe or Arg or Ala
  MISC_FEATURE (881)..(881): Leu or Ala or Phe or Absent or His or Lys or Pro or Gln or Glu or Asp or Met or Ser or Thr or Ile or Val
  MISC_FEATURE (882)..(882): Ala or Ser or Glu or Absent or Lys or Asn or Asp or Gly or Thr or Gln or His or Val or Leu
  MISC_FEATURE (883)..(883): Val or Absent or Asn or Arg or Gln or Asp or Ala or Glu or Ser or Gly or Lys or Thr
  MISC_FEATURE (884)..(884): Ala or Absent or Ile or Leu or Val or Ser or Thr or Met or Lys or Glu or Trp or Phe
  MISC_FEATURE (885)..(885): Arg or Absent or Lys or Glu or Ile or Ala or Ser or Val or Thr or Leu or Asp or His or Gln or Gly or Cys
  MISC_FEATURE (886)..(886): Absent or Ala or Asp or Lys or Gln or Glu or Arg or Ile or Gly or Thr or Val or Ser or Leu
  MISC_FEATURE (887)..(887): Absent or Ser or Ala or Glu or Leu or Asp or Tyr or Trp or Phe or His or Arg or Asn
  MISC_FEATURE (888)..(888): Absent or Ile or Val or Leu or Phe or Met or Thr or Ala
  MISC_FEATURE (889)..(889): Absent or Thr or Ile or Ala or Leu or Lys or His or Gln or Val or Met or Asn or Glu or Asp or Arg or Ser
  MISC_FEATURE (890)..(890): Absent or Lys or Asp or Ala or Gln or Asn or Ser or Gly or Thr
  MISC_FEATURE (891)..(891): Absent or His or Phe or Trp or Leu or Tyr or Glu
  MISC_FEATURE (892)..(892): Absent or Val or Thr or Leu or Met
  MISC_FEATURE (893)..(893): Absent or Val or Ala or Asn or Glu or Lys or His or Arg or Gln or Asp
  MISC_FEATURE (894)..(894): Absent or Lys or Asp or Gln or Ala or Glu or Tyr or Gly or Ser or Thr
  MISC_FEATURE (895)..(895): Absent or Thr or Lys or Gln or Ala or Val or Arg or Asn or His or Leu
  MISC_FEATURE (896)..(896): Lys or Val or Glu or Absent or Leu or Met or Thr or Ala or Arg or Gln
  MISC_FEATURE (897)..(897): Leu or Ala or Thr or Absent or Val or Ser or Asn or Pro or Trp
  MISC_FEATURE (898)..(898): Leu or Gln or Ala or Absent or His or Pro or Lys or Arg or Ser or Tyr or Asn or Gly or Val or Ile
  MISC_FEATURE (899)..(899): Pro or Tyr or Arg or Absent or Asn or His or Phe or Val or Ile or Gly
  MISC_FEATURE (900)..(900): Lys or His or Absent or Asp or Tyr or Thr
  MISC_FEATURE (901)..(901): His or Arg or Lys or Absent or Pro or Trp or Gln or Asn or Phe
  MISC_FEATURE (902)..(902): Glu or Val or Trp or Absent or His or Leu or Lys or Ile or Ser or Ala or Arg
  MISC_FEATURE (903)..(903): Val or Arg or Leu or Absent or Ser or Ala or Thr or His or Lys or Tyr or Glu or Ile or Met or Pro
  MISC_FEATURE (904)..(904): Pro or Val or Glu or Absent or Ser or Gly or Arg or Ala or Asn or Lys or Gln or His
  MISC_FEATURE (905)..(905): Asp or Val or Glu or Absent or His or Gly or Thr or Arg or Lys
  MISC_FEATURE (906)..(906): Phe or Gln or Ile or Absent or His or Val or Leu or Asn or Ala
  MISC_FEATURE (907)..(907): Val or Phe or Glu or Absent or Ser or Thr or Ile or Arg or His or Lys or Tyr
  MISC_FEATURE (908)..(908): Trp or Val or Ile or Absent or Leu or Phe or Ala
  MISC_FEATURE (909)..(909): Ile or Asp or Val or Absent or Leu or Met or Phe or Thr
  MISC_FEATURE (910)..(910): Arg or Ser or Absent or Asn or Ala or Asp or Lys or Gly or Glu or Pro or His
  MISC_FEATURE (911)..(911): Asp or Absent or Asn or Gly
  MISC_FEATURE (912)..(912): Glu or Absent or Asp
  MISC_FEATURE (913)..(913): Pro or Absent or Ala or Thr or Gln or Val or Glu or Ser or Leu or Asn or Met or Asp or His
  MISC_FEATURE (914)..(914): Leu or Ile or Absent or Pro or Val or Ser or Asp
  MISC_FEATURE (915)..(915): Glu or Pro or Absent or Asp
  MISC_FEATURE (916)..(916): Arg or Lys or Absent or Pro or Val or Leu
  MISC_FEATURE (917)..(917): Asn or Ser or Absent or Pro or Thr or Ala or Val or Leu
  MISC_FEATURE (918)..(918): Ala or Pro or Absent or Asn or Thr or Gln or Ser
  MISC_FEATURE (919)..(919): Asn or Ser or Ala or Absent or Arg or Thr or Leu
  MISC_FEATURE (920)..(920): Gly or Absent or His or Pro or Asp or Thr
  MISC_FEATURE (921)..(921): Lys or Absent or Val or Ser or Met
  MISC_FEATURE (922)..(922): Val or Ile or Absent or Ser or Leu or Cys or Pro
  MISC_FEATURE (923)..(923): Asp or Leu or Absent or Ile or Val or Met or Lys or Gln
  MISC_FEATURE (924)..(924): Lys or Arg or Absent or Thr
  MISC_FEATURE (925)..(925): Ala or Arg or Absent or Val or Lys or Tyr or Gly
  MISC_FEATURE (926)..(926): Ile or Leu or Lys or Absent or Val or Glu or Asp or Ala or Met or Ser or Gln
  MISC_FEATURE (927)..(927): Val or Ile or Leu or Absent or Gln or Gly
  MISC_FEATURE (928)..(928): Lys or Gln or Absent or Arg or Ile or Ser or Val
  MISC_FEATURE (929)..(929): Glu or Asp or Absent or Ala or Asn or Leu or Thr or Gln or Ser or Lys or Ile or Val
  MISC_FEATURE (930)..(930): Ala or Lys or Absent or Gln or Arg or Met or Glu or Thr or Pro or Gly or Leu or Trp or Val
  MISC_FEATURE (931)..(931): Ala or Met or Ser or Absent or Val or Tyr or Cys or Glu or Gln or Lys or Arg or Pro or Leu or Gly
  MISC_FEATURE (932)..(932): Arg or Leu or Pro or Absent or Lys or Glu or Asp or Gly or Asn or Ala or Ile or Gln or Phe or Ser
  MISC_FEATURE (933)..(933): Lys or Glu or Leu or Absent or Thr or Ala or Gln or Val or Asp or Ser or Ile or Tyr or Arg or Gly or Asn
  MISC_FEATURE (934)..(934): Arg or Ser or Absent or Leu or Met or His or Thr or Asn or Ala or Lys or Val or Phe or Glu or Gly
  MISC_FEATURE (935)..(935): His or Leu or Gly or Absent or Ala or Lys or Val or Ser or Arg or Ile or Thr or Met or Gln or Glu or Pro or Asp or Phe
  MISC_FEATURE (936)..(936): Ala or Lys or Val or Absent or Leu or Glu or Arg or Gln or Phe or Trp or Ser or Tyr or Asp or Gly or Thr or Pro
  MISC_FEATURE (937)..(937): Gln or Asn or Absent or Ala or Ser or Val or Lys or Glu or Gly or Phe or Leu
  MISC_FEATURE (938)..(938): Leu or Ala or Absent or Arg or Lys or Asn or Pro or Thr or Gln or Glu or Asp or Ser or Gly
  MISC_FEATURE (939)..(939): Lys or Absent or Arg or Ser or Pro or Ala or Gly or Val or Tyr or His or Asn or Ile or Leu or Asp or Gln
  MISC_FEATURE (940)..(940): Ala or Absent or Ile or Lys or Arg or Val or Gly or Leu or Glu or Met or Gln or Pro or Asp
  MISC_FEATURE (941)..(941): Ala or Absent or Phe or Pro or Leu or Thr or Ile or Glu or Val or Cys or Ser or Tyr or Arg or Lys
  MISC_FEATURE (942)..(942): Ser or Absent or Thr or Asn or Asp or Glu or Ala or Leu or Arg or Phe or Tyr or Gln or Lys or Val
  MISC_FEATURE (943)..(943): Ala or Absent or Asp or Gly or Ser or Gln or Val or Lys or Arg or Glu or Ile or His or Asn or Pro
  MISC_FEATURE (944)..(944): Lys or Absent or Val or Arg or Ala or Ser or Phe or Gly or Pro or Tyr or Leu or Glu
  MISC_FEATURE (945)..(945): Pro or Absent or Ile or Thr or Lys or Leu or Ala or Arg or Val or Tyr or Glu or Gln
  MISC_FEATURE (946)..(946): Arg or Absent or Asp or Ala or Leu or Lys or Ser or Cys or His or Phe or Glu
  MISC_FEATURE (947)..(947): Leu or Absent or Arg or Lys or Asn or Ser or Met or Thr or Ala or Asp or Ile
  MISC_FEATURE (948)..(948): Absent or Thr or Leu or Ile or Met or Asp or Ser or Gly or Tyr or Arg or Val or Pro
  MISC_FEATURE (949)..(949): Absent or Met or Val or His or Ala or Arg or Ile or Glu or Gly or Lys or Ser
  MISC_FEATURE (950)..(950): Absent or Gln or Lys or Val or Thr or Ile or Gly or Arg or Ala
  MISC_FEATURE (951)..(951): Absent or Leu or Thr or Gln or Ile or Ala or Ser or Lys
  MISC_FEATURE (952)..(952): Absent or Thr or Ala or Asp or Leu or Lys
  MISC_FEATURE (953)..(953): Absent or Arg or Asn or Ser or Leu
  MISC_FEATURE (954)..(954): Absent or Ile or Cys or Lys or Ala
  MISC_FEATURE (955)..(955): Absent or Asp or Leu or Thr
  MISC_FEATURE (956)..(956): Absent or Tyr or Glu or Asn
  MISC_FEATURE (957)..(957): Absent or Lys or Ala or Thr
  MISC_FEATURE (958)..(958): Absent or Pro or Lys or Ser
  MISC_FEATURE (959)..(959): Absent or Thr or Gly or Lys
  MISC_FEATURE (960)..(960): Absent or Ser or Arg
  MISC_FEATURE (961)..(961): Absent or Ser or Gly or Asn
  MISC_FEATURE (962)..(962): Absent or Gln or Ser or Lys
  MISC_FEATURE (963)..(963): Absent or Met or Asp
  MISC_FEATURE (964)..(964): Absent or His or Val or Glu
  MISC_FEATURE (965)..(965): Absent or Pro or Cys or Glu
  MISC_FEATURE (966)..(966): Absent or Glu or Cys or Tyr
  MISC_FEATURE (967)..(967): Absent or Val or Pro or Ala or Ser
  MISC_FEATURE (968)..(968): Absent or Pro or Arg or Gly
  MISC_FEATURE (969)..(969): Absent or Ser or Glu
  MISC_FEATURE (970)..(970): Absent or Arg or Leu or Thr
  MISC_FEATURE (971)..(971): Absent or Ile or Ser or Ala
  MISC_FEATURE (972)..(972): Absent or Asp or His or Ala or Phe
  MISC_FEATURE (973)..(973): Absent or Val or Thr or Arg or Ser
  MISC_FEATURE (974)..(974): Absent or Pro or Ile or Val
  MISC_FEATURE (975)..(975): Absent or Gly or Phe or Ile or Val
  MISC_FEATURE (976)..(976): Absent or Asp or Ile or Val or Ser
  MISC_FEATURE (977)..(977): Absent or His or Glu or Pro
  MISC_FEATURE (978)..(978): Absent or Pro or Asp or Val
  MISC_FEATURE (979)..(979): Absent or Pro or Val or Ala
  MISC_FEATURE (980)..(980): Absent or Thr or Arg or Ala
  MISC_FEATURE (981)..(981): Absent or Gly or Val or Ala
  MISC_FEATURE (982)..(982): Absent or Pro or Gly
  MISC_FEATURE (983)..(983): Absent or Arg
  MISC_FEATURE (984)..(984): Absent or Ser or Arg
  MISC_FEATURE (985)..(985): Absent or Tyr or Leu
  MISC_FEATURE (986)..(986): Absent or Ile or Asp
  MISC_FEATURE (987)..(987): Absent or Pro or Arg
  MISC_FEATURE (988)..(988): Absent or Ser or Arg
  MISC_FEATURE (989)..(989): Absent or Val or Ala
  MISC_FEATURE (990)..(990): Absent or Arg or Pro
  MISC_FEATURE (991)..(991): Absent or Cys or Arg
  MISC_FEATURE (992)..(992): Absent or Gly or Leu
  MISC_FEATURE (993)..(993): Absent or Tyr or Phe
  MISC_FEATURE (994)..(994): Absent or Arg or Tyr
  MISC_FEATURE (995)..(995): Absent or Leu or Gly
  MISC_FEATURE (996)..(996): Absent or Ser
  MISC_FEATURE (997)..(997): Absent or Thr or Gly
  MISC_FEATURE (998)..(998): Absent or Asn or Ala
  MISC_FEATURE (999)..(999): Absent or Thr or Cys
  MISC_FEATURE (1000)..(1000): Absent or Pro or Asp
  MISC_FEATURE (1001)..(1001): Absent or Thr or Leu
  MISC_FEATURE (1002)..(1002): Absent or Asp or Gly
  MISC_FEATURE (1003)..(1003): Absent or Gln or Glu
  MISC_FEATURE (1004)..(1004): Absent or Leu or Ile
  MISC_FEATURE (1005)..(1005): Absent or Asp or Arg
  MISC_FEATURE (1006)..(1006): Absent or Asn or Glu
  MISC_FEATURE (1007)..(1007): Absent or Met or Gly
  MISC_FEATURE (1008)..(1008): Absent or Arg or Lys
  MISC_FEATURE (1009)..(1009): Absent or Leu or Pro
  MISC_FEATURE (1010)..(1010): Absent or Ser or Ala
  MISC_FEATURE (1011)..(1011): Absent or Arg or Gly
  MISC_FEATURE (1012)..(1012): Absent or Cys or Glu
  MISC_FEATURE (1013)..(1013): Absent or Gln or Lys
  MISC_FEATURE (1014)..(1014): Absent or Leu or Arg
  MISC_FEATURE (1015)..(1015): Absent or Leu or Glu
  MISC_FEATURE (1016)..(1016): Absent or Thr or Glu
  MISC_FEATURE (1017)..(1017): Absent or Ser or Ala
  MISC_FEATURE (1018)..(1018): Absent or Thr or Ala
  MISC_FEATURE (1019)..(1019): Absent or Ala or Cys
  MISC_FEATURE (1020)..(1020): Absent or Ala or Glu
  MISC_FEATURE (1021)..(1021): Absent or Val or Gln
  MISC_FEATURE (1022)..(1022): Absent or Gly or Gln
  MISC_FEATURE (1023)..(1023): Absent or Val or Gly
  MISC_FEATURE (1024)..(1024): Absent or Val or Cys
  MISC_FEATURE (1025)..(1025): Absent or Val or Met
  MISC_FEATURE (1026)..(1026): Absent or Gly or Pro
  MISC_FEATURE (1027)..(1027): Absent or Gln or Leu
  MISC_FEATURE (1028)..(1028): Absent or Ser or Ala
  MISC_FEATURE (1029)..(1029): Absent or Ile or Gly
  MISC_FEATURE (1030)..(1030): Absent or Leu or His
  MISC_FEATURE (1031)..(1031): Absent or Pro or Glu
  MISC_FEATURE (1032)..(1032): Absent or Ser or Arg
  MISC_FEATURE (1033)..(1033): Absent or Ser or Lys
  MISC_FEATURE (1034)..(1034): Absent or Asn or Cys
  MISC_FEATURE (1035)..(1035): Absent or His or Arg
  MISC_FEATURE (1036)..(1036): Absent or Asp or Ala
  MISC_FEATURE (1037)..(1037): Absent or Ser or Arg
  MISC_FEATURE (1038)..(1038): Absent or Thr or Gly
  MISC_FEATURE (1039)..(1039): Absent or Ile or Ala
  MISC_FEATURE (1040)..(1040): Absent or Lys or Asp
  MISC_FEATURE (1041)..(1041): Absent or Gly or Arg
  MISC_FEATURE (1042)..(1042): Absent or Phe or Ile
  MISC_FEATURE (1043)..(1043): Absent or Glu or Val
  MISC_FEATURE (1044)..(1044): Absent or Ala or Asp
  MISC_FEATURE (1045)..(1045): Absent or Pro or Gly
  MISC_FEATURE (1046)..(1046): Absent or Ala or Pro
  MISC_FEATURE (1047)..(1047): Absent or Met or Asn
  MISC_FEATURE (1048)..(1048): Absent or Glu or Thr
  MISC_FEATURE (1049)..(1049): Absent or Tyr or Gly
  MISC_FEATURE (1050)..(1050): Absent or Arg or Thr
  MISC_FEATURE (1051)..(1051): Absent or Pro or Arg
  MISC_FEATURE (1052)..(1052): Absent or Arg or Gly
  MISC_FEATURE (1053)..(1053): Absent or Phe or Pro
  MISC_FEATURE (1054)..(1054): Absent or Arg or Trp
  MISC_FEATURE (1055)..(1055): Absent or Tyr or Phe
  MISC_FEATURE (1056)..(1056): Absent or Trp or Ser
  MISC_FEATURE (1057)..(1057): Absent or Leu or Gly
  MISC_FEATURE (1058)..(1058): Absent or Pro
  MISC_FEATURE (1059)..(1059): Absent or Asp or Leu
  MISC_FEATURE (1060)..(1060): Absent or Ala or Met
  MISC_FEATURE (1061)..(1061): Absent or Asp
  MISC_FEATURE (1062)..(1062): Absent or Val or Arg
  MISC_FEATURE (1063)..(1063): Absent or Asp or Ser
  MISC_FEATURE (1064)..(1064): Absent or His or Leu
  MISC_FEATURE (1065)..(1065): Absent or Asp or Ala
  MISC_FEATURE (1066)..(1066): Absent or Ile or Phe
  MISC_FEATURE (1067)..(1067): Absent or Leu
  MISC_FEATURE (1068)..(1068): Absent or Lys
  MISC_FEATURE (1069)..(1069): Absent or Asn
  MISC_FEATURE (1070)..(1070): Absent or Asp
  MISC_FEATURE (1071)..(1071): Absent or Ile
  MISC_FEATURE (1072)..(1072): Absent or Gln
  MISC_FEATURE (1073)..(1073): Absent or Asp
  MISC_FEATURE (1074)..(1074): Absent or Leu
  MISC_FEATURE (1075)..(1075): Absent or Lys
  MISC_FEATURE (1076)..(1076): Absent or Lys
  MISC_FEATURE (1077)..(1077): Absent or Leu
  MISC_FEATURE (1078)..(1078): Absent or Gly
  MISC_FEATURE (1079)..(1079): Absent or Ala
  MISC_FEATURE (1080)..(1080): Absent or Gly
  MISC_FEATURE (1081)..(1081): Absent or Gly
  MISC_FEATURE (1082)..(1082): Absent or Leu
  MISC_FEATURE (1083)..(1083): Absent or Glu
  MISC_FEATURE (1084)..(1084): Absent or Phe
  MISC_FEATURE (1085)..(1085): Absent or Val
  MISC_FEATURE (1086)..(1086): Absent or Pro
  MISC_FEATURE (1087)..(1087): Absent or Phe
  MISC_FEATURE (1088)..(1088): Absent or Tyr
  MISC_FEATURE (1089)..(1089): Absent or Asn
  MISC_FEATURE (1090)..(1090): Absent or Tyr
  MISC_FEATURE (1091)..(1091): Absent or Gly
  MISC_FEATURE (1092)..(1092): Absent or Phe
  MISC_FEATURE (1093)..(1093): Absent or Gly
  MISC_FEATURE (1094)..(1094): Absent or Gly
  MISC_FEATURE (1095)..(1095): Absent or Val
  MISC_FEATURE (1096)..(1096): Absent or Asn
  MISC_FEATURE (1097)..(1097): Absent or Asp
  MISC_FEATURE (1098)..(1098): Absent or Ser
  MISC_FEATURE (1099)..(1099): Absent or Lys
  MISC_FEATURE (1100)..(1100): Absent or Leu
  MISC_FEATURE (1101)..(1101): Absent or Glu
  MISC_FEATURE (1102)..(1102): Absent or Thr
  MISC_FEATURE (1103)..(1103): Absent or Tyr
  MISC_FEATURE (1104)..(1104): Absent or Ala
  MISC_FEATURE (1105)..(1105): Absent or Phe
  MISC_FEATURE (1106)..(1106): Absent or Gly
  MISC_FEATURE (1107)..(1107): Absent or Ser
  MISC_FEATURE (1108)..(1108): Absent or Pro
  MISC_FEATURE (1109)..(1109): Absent or Ala
  MISC_FEATURE (1110)..(1110): Absent or Phe
  MISC_FEATURE (1111)..(1111): Absent or Lys
  MISC_FEATURE (1112)..(1112): Absent or Asn
  MISC_FEATURE (1113)..(1113): Absent or Val
  MISC_FEATURE (1114)..(1114): Absent or Leu
  MISC_FEATURE (1115)..(1115): Absent or Gln
  MISC_FEATURE (1116)..(1116): Absent or Ile
  MISC_FEATURE (1117)..(1117): Absent or Ala
  MISC_FEATURE (1118)..(1118): Absent or Leu
  MISC_FEATURE (1119)..(1119): Absent or Glu
  MISC_FEATURE (1120)..(1120): Absent or Ala
  MISC_FEATURE (1121)..(1121): Absent or Thr
  MISC_FEATURE (1122)..(1122): Absent or Lys
  MISC_FEATURE (1123)..(1123): Absent or Ala
  MISC_FEATURE (1124)..(1124): Absent or Asn
  MISC_FEATURE (1125)..(1125): Absent or Gly
  MISC_FEATURE (1126)..(1126): Absent or Leu
  MISC_FEATURE (1127)..(1127): Absent or Ser
  MISC_FEATURE (1128)..(1128): Absent or Ile
  MISC_FEATURE (1129)..(1129): Absent or Asp
  MISC_FEATURE (1130)..(1130): Absent or Val
  MISC_FEATURE (1131)..(1131): Absent or Ala
  MISC_FEATURE (1132)..(1132): Absent or Leu
  MISC_FEATURE (1133)..(1133): Absent or Gly
  MISC_FEATURE (1134)..(1134): Absent or Ala
  MISC_FEATURE (1135)..(1135): Absent or Ser
  MISC_FEATURE (1136)..(1136): Absent or Gln
  MISC_FEATURE (1137)..(1137): Absent or Gly
  MISC_FEATURE (1138)..(1138): Absent or Gln
  MISC_FEATURE (1139)..(1139): Absent or Gly
  MISC_FEATURE (1140)..(1140): Absent or Val
  MISC_FEATURE (1141)..(1141): Absent or Pro
  MISC_FEATURE (1142)..(1142): Absent or Ser
  MISC_FEATURE (1143)..(1143): Absent or Lys
  MISC_FEATURE (1144)..(1144): Absent or Pro
  MISC_FEATURE (1145)..(1145): Absent or Leu
  MISC_FEATURE (1146)..(1146): Absent or Thr
  MISC_FEATURE (1147)..(1147): Absent or Pro
  MISC_FEATURE (1148)..(1148): Absent or Gly
  MISC_FEATURE (1149)..(1149): Absent or Leu
  MISC_FEATURE (1150)..(1150): Absent or Ala
  MISC_FEATURE (1151)..(1151): Absent or Val
  MISC_FEATURE (1152)..(1152): Absent or Gln
  MISC_FEATURE (1153)..(1153): Absent or Leu
  MISC_FEATURE (1154)..(1154): Absent or Val
  MISC_FEATURE (1155)..(1155): Absent or Tyr
  MISC_FEATURE (1156)..(1156): Absent or Gly
  MISC_FEATURE (1157)..(1157): Absent or Lys
  MISC_FEATURE (1158)..(1158): Absent or Thr
  MISC_FEATURE (1159)..(1159): Absent or Ser
  MISC_FEATURE (1160)..(1160): Absent or Val
  MISC_FEATURE (1161)..(1161): Absent or Lys
  MISC_FEATURE (1162)..(1162): Absent or Gly
  MISC_FEATURE (1163)..(1163): Absent or Gly
  MISC_FEATURE (1164)..(1164): Absent or Ala
  MISC_FEATURE (1165)..(1165): Absent or Lys
  MISC_FEATURE (1166)..(1166): Absent or Phe
  MISC_FEATURE (1167)..(1167): Absent or Asp
  MISC_FEATURE (1168)..(1168): Absent or Gly
  MISC_FEATURE (1169)..(1169): Absent or Ala
  MISC_FEATURE (1170)..(1170): Absent or Leu
  MISC_FEATURE (1171)..(1171): Absent or Pro
  MISC_FEATURE (1172)..(1172): Absent or Ala
  MISC_FEATURE (1173)..(1173): Absent or Ala
  MISC_FEATURE (1174)..(1174): Absent or Asp
  MISC_FEATURE (1175)..(1175): Absent or Ile
  MISC_FEATURE (1176)..(1176): Absent or Asn
  MISC_FEATURE (1177)..(1177): Absent or Trp
  MISC_FEATURE (1178)..(1178): Absent or Asn
  MISC_FEATURE (1179)..(1179): Absent or Glu
  MISC_FEATURE (1180)..(1180): Absent or Asn
  MISC_FEATURE (1181)..(1181): Absent or Leu
  MISC_FEATURE (1182)..(1182): Absent or Gly
  MISC_FEATURE (1183)..(1183): Absent or Tyr
  MISC_FEATURE (1184)..(1184): Absent or Ile
  MISC_FEATURE (1185)..(1185): Absent or His
  MISC_FEATURE (1186)..(1186): Absent or Pro
  MISC_FEATURE (1187)..(1187): Absent or Gln
  MISC_FEATURE (1188)..(1188): Absent or Glu
  MISC_FEATURE (1189)..(1189): Absent or Lys
  MISC_FEATURE (1190)..(1190): Absent or Phe
  MISC_FEATURE (1191)..(1191): Absent or Gly
  MISC_FEATURE (1192)..(1192): Absent or Gly
  MISC_FEATURE (1193)..(1193): Absent or Asn
  MISC_FEATURE (1194)..(1194): Absent or Arg
  MISC_FEATURE (1195)..(1195): Absent or Leu
  MISC_FEATURE (1196)..(1196): Absent or Ile
  MISC_FEATURE (1197)..(1197): Absent or Gly
  MISC_FEATURE (1198)..(1198): Absent or Val
  MISC_FEATURE (1199)..(1199): Absent or Ser
  MISC_FEATURE (1200)..(1200): Absent or Ala
  MISC_FEATURE (1201)..(1201): Absent or Ala
  MISC_FEATURE (1202)..(1202): Absent or Ala
  MISC_FEATURE (1203)..(1203): Absent or Val
  MISC_FEATURE (1204)..(1204): Absent or Ala
  MISC_FEATURE (1205)..(1205): Absent or Ser
  MISC_FEATURE (1206)..(1206): Absent or Lys
  MISC_FEATURE (1207)..(1207): Absent or Asn
  MISC_FEATURE (1208)..(1208): Absent or Val
  MISC_FEATURE (1209)..(1209): Absent or Ser
  MISC_FEATURE (1210)..(1210): Absent or Gly
  MISC_FEATURE (1211)..(1211): Absent or Asp
  MISC_FEATURE (1212)..(1212): Absent or Asn
  MISC_FEATURE (1213)..(1213): Absent or Thr
  MISC_FEATURE (1214)..(1214): Absent or Tyr
  MISC_FEATURE (1215)..(1215): Absent or Val
  MISC_FEATURE (1216)..(1216): Absent or Ser
  MISC_FEATURE (1217)..(1217): Absent or Leu
  MISC_FEATURE (1218)..(1218): Absent or His
  MISC_FEATURE (1219)..(1219): Absent or Glu
  MISC_FEATURE (1220)..(1220): Absent or Lys
  MISC_FEATURE (1221)..(1221): Absent or Ser
  MISC_FEATURE (1222)..(1222): Absent or Leu
  MISC_FEATURE (1223)..(1223): Absent or Val
  MISC_FEATURE (1224)..(1224): Absent or Asp
  MISC_FEATURE (1225)..(1225): Absent or Leu
  MISC_FEATURE (1226)..(1226): Absent or Thr
  MISC_FEATURE (1227)..(1227): Absent or Lys
  MISC_FEATURE (1228)..(1228): Absent or His
  MISC_FEATURE (1229)..(1229): Absent or Val
  MISC_FEATURE (1230)..(1230): Absent or Lys
  MISC_FEATURE (1231)..(1231): Absent or Asp
  MISC_FEATURE (1232)..(1232): Absent or Gly
  MISC_FEATURE (1233)..(1233): Absent or Lys
  MISC_FEATURE (1234)..(1234): Absent or Ile
  MISC_FEATURE (1235)..(1235): Absent or Thr
  MISC_FEATURE (1236)..(1236): Absent or Trp
  MISC_FEATURE (1237)..(1237): Absent or Thr
  MISC_FEATURE (1238)..(1238): Absent or Ala
  MISC_FEATURE (1239)..(1239): Absent or Pro
  MISC_FEATURE (1240)..(1240): Absent or Thr
  MISC_FEATURE (1241)..(1241): Absent or Asp
  MISC_FEATURE (1242)..(1242): Absent or His
  MISC_FEATURE (1243)..(1243): Absent or Lys
  MISC_FEATURE (1244)..(1244): Absent or Glu
  MISC_FEATURE (1245)..(1245): Absent or Tyr
  MISC_FEATURE (1246)..(1246): Absent or Val
  MISC_FEATURE (1247)..(1247): Absent or Leu
  MISC_FEATURE (1248)..(1248): Absent or Phe
  MISC_FEATURE (1249)..(1249): Absent or Ala
  MISC_FEATURE (1250)..(1250): Absent or His
  MISC_FEATURE (1251)..(1251): Absent or Tyr
  MISC_FEATURE (1252)..(1252): Absent or Glu
  MISC_FEATURE (1253)..(1253): Absent or Arg
  MISC_FEATURE (1254)..(1254): Absent or Tyr
  MISC_FEATURE (1255)..(1255): Absent or Thr
  MISC_FEATURE (1256)..(1256): Absent or Asn
  MISC_FEATURE (1257)..(1257): Absent or Gln
  MISC_FEATURE (1258)..(1258): Absent or Arg
  MISC_FEATURE (1259)..(1259): Absent or Ser
  MISC_FEATURE (1260)..(1260): Absent or Ala
  MISC_FEATURE (1261)..(1261): Absent or Asp
  MISC_FEATURE (1262)..(1262): Absent or Gly
  MISC_FEATURE (1263)..(1263): Absent or Val
  MISC_FEATURE (1264)..(1264): Absent or Pro
  MISC_FEATURE (1265)..(1265): Absent or Thr
  MISC_FEATURE (1266)..(1266): Absent or Ser
  MISC_FEATURE (1267)..(1267): Absent or Val
  MISC_FEATURE (1268)..(1268): Absent or Ile
  MISC_FEATURE (1269)..(1269): Absent or Ala
  MISC_FEATURE (1270)..(1270): Absent or Asn
  MISC_FEATURE (1271)..(1271): Absent or Gly
  MISC_FEATURE (1272)..(1272): Absent or Ser
  MISC_FEATURE (1273)..(1273): Absent or Trp
  MISC_FEATURE (1274)..(1274): Absent or Val
  MISC_FEATURE (1275)..(1275): Absent or Thr
  MISC_FEATURE (1276)..(1276): Absent or Asp
  MISC_FEATURE (1277)..(1277): Absent or His
  MISC_FEATURE (1278)..(1278): Absent or Phe
  MISC_FEATURE (1279)..(1279): Absent or Ser
  MISC_FEATURE (1280)..(1280): Absent or Ala
  MISC_FEATURE (1281)..(1281): Absent or Thr
  MISC_FEATURE (1282)..(1282): Absent or Gly
  MISC_FEATURE (1283)..(1283): Absent or Ala
  MISC_FEATURE (1284)..(1284): Absent or Lys
  MISC_FEATURE (1285)..(1285): Absent or Leu
  MISC_FEATURE (1286)..(1286): Absent or Ala
  MISC_FEATURE (1287)..(1287): Absent or Ala
  MISC_FEATURE (1288)..(1288): Absent or Gln
  MISC_FEATURE (1289)..(1289): Absent or Phe
  MISC_FEATURE (1290)..(1290): Absent or Trp
  MISC_FEATURE (1291)..(1291): Absent or Glu
  MISC_FEATURE (1292)..(1292): Absent or Lys
  MISC_FEATURE (1293)..(1293): Absent or Asn
  MISC_FEATURE (1294)..(1294): Absent or Leu
  MISC_FEATURE (1295)..(1295): Absent or Leu
  MISC_FEATURE (1296)..(1296): Absent or Ser
  MISC_FEATURE (1297)..(1297): Absent or Thr
  MISC_FEATURE (1298)..(1298): Absent or Gln
  MISC_FEATURE (1299)..(1299): Absent or Ile
  MISC_FEATURE (1300)..(1300): Absent or Arg
  MISC_FEATURE (1301)..(1301): Absent or Gln
  MISC_FEATURE (1302)..(1302): Absent or Leu
  MISC_FEATURE (1303)..(1303): Absent or Leu
  MISC_FEATURE (1304)..(1304): Absent or Lys
  MISC_FEATURE (1305)..(1305): Absent or Glu
  MISC_FEATURE (1306)..(1306): Absent or Val
  MISC_FEATURE (1307)..(1307): Absent or Gly
  MISC_FEATURE (1308)..(1308): Absent or Lys
  MISC_FEATURE (1309)..(1309): Absent or His
  MISC_FEATURE (1310)..(1310): Absent or Thr
  MISC_FEATURE (1311)..(1311): Absent or Trp
  MISC_FEATURE (1312)..(1312): Absent or Glu
  MISC_FEATURE (1313)..(1313): Absent or Asp
  MISC_FEATURE (1314)..(1314): Absent or Ser
  MISC_FEATURE (1315)..(1315): Absent or Met
  MISC_FEATURE (1316)..(1316): Absent or Glu
  MISC_FEATURE (1317)..(1317): Absent or Ile
  MISC_FEATURE (1318)..(1318): Absent or Gln
  MISC_FEATURE (1319)..(1319): Absent or Ala
  MISC_FEATURE (1320)..(1320): Absent or Ser
  MISC_FEATURE (1321)..(1321): Absent or Leu
  MISC_FEATURE (1322)..(1322): Absent or Tyr
  MISC_FEATURE (1323)..(1323): Absent or Trp
  MISC_FEATURE (1324)..(1324): Absent or Ser
  MISC_FEATURE (1325)..(1325): Absent or Pro
  MISC_FEATURE (1326)..(1326): Absent or Gly
  MISC_FEATURE (1327)..(1327): Absent or Phe
  MISC_FEATURE (1328)..(1328): Absent or Leu
  MISC_FEATURE (1329)..(1329): Absent or Asp
  MISC_FEATURE (1330)..(1330): Absent or Asn
  MISC_FEATURE (1331)..(1331): Absent or Phe
  MISC_FEATURE (1332)..(1332): Absent or Lys
  MISC_FEATURE (1333)..(1333): Absent or Thr
  MISC_FEATURE (1334)..(1334): Absent or Lys
  MISC_FEATURE (1335)..(1335): Absent or Arg
  MISC_FEATURE (1336)..(1336): Absent or Gly
  MISC_FEATURE (1337)..(1337): Absent or Tyr
  MISC_FEATURE (1338)..(1338): Absent or Asn
  MISC_FEATURE (1339)..(1339): Absent or Val
  MISC_FEATURE (1340)..(1340): Absent or Ile
  MISC_FEATURE (1341)..(1341): Absent or Lys
  MISC_FEATURE (1342)..(1342): Absent or Tyr
  MISC_FEATURE (1343)..(1343): Absent or Leu
  MISC_FEATURE (1344)..(1344): Absent or Pro
  MISC_FEATURE (1345)..(1345): Absent or Leu
  MISC_FEATURE (1346)..(1346): Absent or Leu
  MISC_FEATURE (1347)..(1347): Absent or Phe
  MISC_FEATURE (1348)..(1348): Absent or His
  MISC_FEATURE (1349)..(1349): Absent or Lys
  MISC_FEATURE (1350)..(1350): Absent or Ser
  MISC_FEATURE (1351)..(1351): Absent or Thr
  MISC_FEATURE (1352)..(1352): Absent or Ser
  MISC_FEATURE (1353)..(1353): Absent or Phe
  MISC_FEATURE (1354)..(1354): Absent or Gln
  MISC_FEATURE (1355)..(1355): Absent or Ala
  MISC_FEATURE (1356)..(1356): Absent or Ala
  MISC_FEATURE (1357)..(1357): Absent or Arg
  MISC_FEATURE (1358)..(1358): Absent or Ala
  MISC_FEATURE (1359)..(1359): Absent or Pro
  MISC_FEATURE (1360)..(1360): Absent or Tyr
  MISC_FEATURE (1361)..(1361): Absent or Asn
  MISC_FEATURE (1362)..(1362): Absent or Thr
  MISC_FEATURE (1363)..(1363): Absent or Thr
  MISC_FEATURE (1364)..(1364): Absent or Phe
  MISC_FEATURE (1365)..(1365): Absent or Ile
  MISC_FEATURE (1366)..(1366): Absent or Leu
  MISC_FEATURE (1367)..(1367): Absent or Asp
  MISC_FEATURE (1368)..(1368): Absent or Asn
  MISC_FEATURE (1369)..(1369): Absent or Ile
  MISC_FEATURE (1370)..(1370): Absent or Pro
  MISC_FEATURE (1371)..(1371): Absent or Asp
  MISC_FEATURE (1372)..(1372): Absent or Asn
  MISC_FEATURE (1373)..(1373): Absent or Gly
  MISC_FEATURE (1374)..(1374): Absent or Gln
  MISC_FEATURE (1375)..(1375): Absent or Ser
  MISC_FEATURE (1376)..(1376): Absent or Lys
  MISC_FEATURE (1377)..(1377): Absent or Tyr
  MISC_FEATURE (1378)..(1378): Absent or Leu
  MISC_FEATURE (1379)..(1379): Absent or Gln
  MISC_FEATURE (1380)..(1380): Absent or Asp
  MISC_FEATURE (1381)..(1381): Absent or Tyr
  MISC_FEATURE (1382)..(1382): Absent or Arg
  MISC_FEATURE (1383)..(1383): Absent or Thr
  MISC_FEATURE (1384)..(1384): Absent or Thr
  MISC_FEATURE (1385)..(1385): Absent or Leu
  MISC_FEATURE (1386)..(1386): Absent or Asn
  MISC_FEATURE (1387)..(1387): Absent or Glu
  MISC_FEATURE (1388)..(1388): Absent or Gly
  MISC_FEATURE (1389)..(1389): Absent or Tyr
  MISC_FEATURE (1390)..(1390): Absent or Gln
  MISC_FEATURE (1391)..(1391): Absent or Glu
  MISC_FEATURE (1392)..(1392): Absent or Tyr
  MISC_FEATURE (1393)..(1393): Absent or Leu
  MISC_FEATURE (1394)..(1394): Absent or Gln
  MISC_FEATURE (1395)..(1395): Absent or Glu
  MISC_FEATURE (1396)..(1396): Absent or Phe
  MISC_FEATURE (1397)..(1397): Absent or Glu
  MISC_FEATURE (1398)..(1398): Absent or Asn
  MISC_FEATURE (1399)..(1399): Absent or Trp
  MISC_FEATURE (1400)..(1400): Absent or Ala
  MISC_FEATURE (1401)..(1401): Absent or Glu
  MISC_FEATURE (1402)..(1402): Absent or Ser
  MISC_FEATURE (1403)..(1403): Absent or Leu
  MISC_FEATURE (1404)..(1404): Absent or Gly
  MISC_FEATURE (1405)..(1405): Absent or Leu
  MISC_FEATURE (1406)..(1406): Absent or Ser
  MISC_FEATURE (1407)..(1407): Absent or His
  MISC_FEATURE (1408)..(1408): Absent or Ser
  MISC_FEATURE (1409)..(1409): Absent or Cys
  MISC_FEATURE (1410)..(1410): Absent or Gln
  MISC_FEATURE (1411)..(1411): Absent or Val
  MISC_FEATURE (1412)..(1412): Absent or Gly
  MISC_FEATURE (1413)..(1413): Absent or Tyr
  MISC_FEATURE (1414)..(1414): Absent or Gly
  MISC_FEATURE (1415)..(1415): Absent or Val
  MISC_FEATURE (1416)..(1416): Absent or Pro
  MISC_FEATURE (1417)..(1417): Absent or Leu
  MISC_FEATURE (1418)..(1418): Absent or Asp
  MISC_FEATURE (1419)..(1419): Absent or Val
  MISC_FEATURE (1420)..(1420): Absent or Leu
  MISC_FEATURE (1421)..(1421): Absent or Ala
  MISC_FEATURE (1422)..(1422): Absent or Asp
  MISC_FEATURE (1423)..(1423): Absent or Val
  MISC_FEATURE (1424)..(1424): Absent or Pro
  MISC_FEATURE (1425)..(1425): Absent or Ile
  MISC_FEATURE (1426)..(1426): Absent or Val
  MISC_FEATURE (1427)..(1427): Absent or Ser
  MISC_FEATURE (1428)..(1428): Absent or Val
  MISC_FEATURE (1429)..(1429): Absent or Pro
  MISC_FEATURE (1430)..(1430): Absent or Glu
  MISC_FEATURE (1431)..(1431): Absent or Leu
  MISC_FEATURE (1432)..(1432): Absent or Glu
  MISC_FEATURE (1433)..(1433): Absent or Ser
  MISC_FEATURE (1434)..(1434): Absent or Leu
  MISC_FEATURE (1435)..(1435): Absent or Gly
  MISC_FEATURE (1436)..(1436): Absent or Phe
  MISC_FEATURE (1437)..(1437): Absent or Leu
  MISC_FEATURE (1438)..(1438): Absent or Thr
  MISC_FEATURE (1439)..(1439): Absent or Pro
  MISC_FEATURE (1440)..(1440): Absent or Asp
  MISC_FEATURE (1441)..(1441): Absent or Gln
  MISC_FEATURE (1442)..(1442): Absent or Met
  MISC_FEATURE (1443)..(1443): Absent or Ser
  MISC_FEATURE (1444)..(1444): Absent or Gln
  MISC_FEATURE (1445)..(1445): Absent or Phe
  MISC_FEATURE (1446)..(1446): Absent or Val
  MISC_FEATURE (1447)..(1447): Absent or Gly
  MISC_FEATURE (1448)..(1448): Absent or Pro
  MISC_FEATURE (1449)..(1449): Absent or Ala
  MISC_FEATURE (1450)..(1450): Absent or His
  MISC_FEATURE (1451)..(1451): Absent or Leu
  MISC_FEATURE (1452)..(1452): Absent or Gly
  MISC_FEATURE (1453)..(1453): Absent or Arg
  MISC_FEATURE (1454)..(1454): Absent or Arg
  MISC_FEATURE (1455)..(1455): Absent or Asn
  MISC_FEATURE (1456)..(1456): Absent or Ile
  MISC_FEATURE (1457)..(1457): Absent or Ile
  MISC_FEATURE (1458)..(1458): Absent or Ser
  MISC_FEATURE (1459)..(1459): Absent or Thr
  MISC_FEATURE (1460)..(1460): Absent or Glu
  MISC_FEATURE (1461)..(1461): Absent or Ile
  MISC_FEATURE (1462)..(1462): Absent or Gly
  MISC_FEATURE (1463)..(1463): Absent or Ala
  MISC_FEATURE (1464)..(1464): Absent or Val
  MISC_FEATURE (1465)..(1465): Absent or Ser
  MISC_FEATURE (1466)..(1466): Absent or Ala
  MISC_FEATURE (1467)..(1467): Absent or Gly
  MISC_FEATURE (1468)..(1468): Absent or Ala
  MISC_FEATURE (1469)..(1469): Absent or Tyr
  MISC_FEATURE (1470)..(1470): Absent or Ser
  MISC_FEATURE (1471)..(1471): Absent or Gln
  MISC_FEATURE (1472)..(1472): Absent or Thr
  MISC_FEATURE (1473)..(1473): Absent or Ile
  MISC_FEATURE (1474)..(1474): Absent or Pro
  MISC_FEATURE (1475)..(1475): Absent or Ser
  MISC_FEATURE (1476)..(1476): Absent or Leu
  MISC_FEATURE (1477)..(1477): Absent or Val
  MISC_FEATURE (1478)..(1478): Absent or Asn
  MISC_FEATURE (1479)..(1479): Absent or Leu
  MISC_FEATURE (1480)..(1480): Absent or Phe
  MISC_FEATURE (1481)..(1481): Absent or His
  MISC_FEATURE (1482)..(1482): Absent or Glu
  MISC_FEATURE (1483)..(1483): Absent or Ala
  MISC_FEATURE (1484)..(1484): Absent or Phe
  MISC_FEATURE (1485)..(1485): Absent or Ala
  MISC_FEATURE (1486)..(1486): Absent or Gly
  MISC_FEATURE (1487)..(1487): Absent or Gly
  MISC_FEATURE (1488)..(1488): Absent or Val
  MISC_FEATURE (1489)..(1489): Absent or Asn
  MISC_FEATURE (1490)..(1490): Absent or Ala
  MISC_FEATURE (1491)..(1491): Absent or Met
  MISC_FEATURE (1492)..(1492): Absent or Met
  MISC_FEATURE (1493)..(1493): Absent or Ile
  MISC_FEATURE (1494)..(1494): Absent or His
  MISC_FEATURE (1495)..(1495): Absent or Gly
  MISC_FEATURE (1496)..(1496): Absent or Met
  MISC_FEATURE (1497)..(1497): Absent or Thr
  MISC_FEATURE (1498)..(1498): Absent or Tyr
  MISC_FEATURE (1499)..(1499): Absent or Thr
  MISC_FEATURE (1500)..(1500): Absent or Gly
  MISC_FEATURE (1501)..(1501): Absent or Gln
  MISC_FEATURE (1502)..(1502): Absent or Gln
  MISC_FEATURE (1503)..(1503): Absent or Leu
  MISC_FEATURE (1504)..(1504): Absent or Gly
  MISC_FEATURE (1505)..(1505): Absent or Ser
  MISC_FEATURE (1506)..(1506): Absent or Thr
  MISC_FEATURE (1507)..(1507): Absent or Trp
  MISC_FEATURE (1508)..(1508): Absent or Pro
  MISC_FEATURE (1509)..(1509): Absent or Gly
  MISC_FEATURE (1510)..(1510): Absent or Phe
  MISC_FEATURE (1511)..(1511): Absent or Thr
  MISC_FEATURE (1512)..(1512): Absent or Pro
  MISC_FEATURE (1513)..(1513): Absent or Phe
  MISC_FEATURE (1514)..(1514): Absent or Gln
  MISC_FEATURE (1515)..(1515): Absent or Phe
  MISC_FEATURE (1516)..(1516): Absent or Ile
  MISC_FEATURE (1517)..(1517): Absent or Tyr
  MISC_FEATURE (1518)..(1518): Absent or Thr
  MISC_FEATURE (1519)..(1519): Absent or Glu
  MISC_FEATURE (1520)..(1520): Absent or Met
  MISC_FEATURE (1521)..(1521): Absent or Trp
  MISC_FEATURE (1522)..(1522): Absent or Ser
  MISC_FEATURE (1523)..(1523): Absent or Pro
  MISC_FEATURE (1524)..(1524): Absent or Lys
  MISC_FEATURE (1525)..(1525): Absent or Gln
  MISC_FEATURE (1526)..(1526): Absent or Pro
  MISC_FEATURE (1527)..(1527): Absent or Ala
  MISC_FEATURE (1528)..(1528): Absent or Trp
  MISC_FEATURE (1529)..(1529): Absent or Asn
  MISC_FEATURE (1530)..(1530): Absent or Tyr
  MISC_FEATURE (1531)..(1531): Absent or Met
  MISC_FEATURE (1532)..(1532): Absent or Ser
  MISC_FEATURE (1533)..(1533): Absent or Ala
  MISC_FEATURE (1534)..(1534): Absent or Met
  MISC_FEATURE (1535)..(1535): Absent or Ile
  MISC_FEATURE (1536)..(1536): Absent or Asp
  MISC_FEATURE (1537)..(1537): Absent or Tyr
  MISC_FEATURE (1538)..(1538): Absent or Thr
  MISC_FEATURE (1539)..(1539): Absent or Ala
  MISC_FEATURE (1540)..(1540): Absent or Arg
  MISC_FEATURE (1541)..(1541): Absent or Asn
  MISC_FEATURE (1542)..(1542): Absent or Gln
  MISC_FEATURE (1543)..(1543): Absent or Phe
  MISC_FEATURE (1544)..(1544): Absent or Val
  MISC_FEATURE (1545)..(1545): Absent or Leu
  MISC_FEATURE (1546)..(1546): Absent or Gln
  MISC_FEATURE (1547)..(1547): Absent or Lys
  MISC_FEATURE (1548)..(1548): Absent or Gly
  MISC_FEATURE (1549)..(1549): Absent or Val
  MISC_FEATURE (1550)..(1550): Absent or Pro
  MISC_FEATURE (1551)..(1551): Absent or Lys
  MISC_FEATURE (1552)..(1552): Absent or Lys
  MISC_FEATURE (1553)..(1553): Absent or Asp
  MISC_FEATURE (1554)..(1554): Absent or Leu
  MISC_FEATURE (1555)..(1555): Absent or Val
  MISC_FEATURE (1556)..(1556): Absent or Phe
  MISC_FEATURE (1557)..(1557): Absent or Tyr
  MISC_FEATURE (1558)..(1558): Absent or Leu
  MISC_FEATURE (1559)..(1559): Absent or Tyr
  MISC_FEATURE (1560)..(1560): Absent or Lys
  MISC_FEATURE (1561)..(1561): Absent or Asn
  MISC_FEATURE (1562)..(1562): Absent or Pro
  MISC_FEATURE (1563)..(1563): Absent or Tyr
  MISC_FEATURE (1564)..(1564): Absent or Gly
  MISC_FEATURE (1565)..(1565): Absent or Met
  MISC_FEATURE (1566)..(1566): Absent or Glu
  MISC_FEATURE (1567)..(1567): Absent or Asp
  MISC_FEATURE (1568)..(1568): Absent or Gln
  MISC_FEATURE (1569)..(1569): Absent or Tyr
  MISC_FEATURE (1570)..(1570): Absent or Asn
  MISC_FEATURE (1571)..(1571): Absent or Gly
  MISC_FEATURE (1572)..(1572): Absent or Thr
  MISC_FEATURE (1573)..(1573): Absent or Asp
  MISC_FEATURE (1574)..(1574): Absent or Leu
  MISC_FEATURE (1575)..(1575): Absent or Arg
  MISC_FEATURE (1576)..(1576): Absent or Thr
  MISC_FEATURE (1577)..(1577): Absent or Arg
  MISC_FEATURE (1578)..(1578): Absent or Gly
  MISC_FEATURE (1579)..(1579): Absent or Phe
  MISC_FEATURE (1580)..(1580): Absent or Thr
  MISC_FEATURE (1581)..(1581): Absent or Tyr
  MISC_FEATURE (1582)..(1582): Absent or Glu
  MISC_FEATURE (1583)..(1583): Absent or Tyr
  MISC_FEATURE (1584)..(1584): Absent or Leu
  MISC_FEATURE (1585)..(1585): Absent or Ser
  MISC_FEATURE (1586)..(1586): Absent or Pro
  MISC_FEATURE (1587)..(1587): Absent or Ala
  MISC_FEATURE (1588)..(1588): Absent or Asn
  MISC_FEATURE (1589)..(1589): Absent or Ser
  MISC_FEATURE (1590)..(1590): Absent or Gly
  MISC_FEATURE (1591)..(1591): Absent or Ser
  MISC_FEATURE (1592)..(1592): Absent or Lys
  MISC_FEATURE (1593)..(1593): Absent or Ala
  MISC_FEATURE (1594)..(1594): Absent or Leu
  MISC_FEATURE (1595)..(1595): Absent or Lys
  MISC_FEATURE (1596)..(1596): Absent or Val
  MISC_FEATURE (1597)..(1597): Absent or Ser
  MISC_FEATURE (1598)..(1598): Absent or Asn
  MISC_FEATURE (1599)..(1599): Absent or Lys
  MISC_FEATURE (1600)..(1600): Absent or Val
  MISC_FEATURE (1601)..(1601): Absent or Leu
  MISC_FEATURE (1602)..(1602): Absent or Asp
  MISC_FEATURE (1603)..(1603): Absent or Pro
  MISC_FEATURE (1604)..(1604): Absent or Ser
  MISC_FEATURE (1605)..(1605): Absent or Gly
  MISC_FEATURE (1606)..(1606): Absent or Ala
  MISC_FEATURE (1607)..(1607): Absent or Glu
  MISC_FEATURE (1608)..(1608): Absent or Tyr
  MISC_FEATURE (1609)..(1609): Absent or Arg
  MISC_FEATURE (1610)..(1610): Absent or Ala
  MISC_FEATURE (1611)..(1611): Absent or Leu
  MISC_FEATURE (1612)..(1612): Absent or Val
  MISC_FEATURE (1613)..(1613): Absent or Leu
  MISC_FEATURE (1614)..(1614): Absent or Asp
  MISC_FEATURE (1615)..(1615): Absent or Gln
  MISC_FEATURE (1616)..(1616): Absent or Gln
  MISC_FEATURE (1617)..(1617): Absent or His
  MISC_FEATURE (1618)..(1618): Absent or Phe
  MISC_FEATURE (1619)..(1619): Absent or Ile
  MISC_FEATURE (1620)..(1620): Absent or Thr
  MISC_FEATURE (1621)..(1621): Absent or Ala
  MISC_FEATURE (1622)..(1622): Absent or Glu
  MISC_FEATURE (1623)..(1623): Absent or Ala
  MISC_FEATURE (1624)..(1624): Absent or Ala
  MISC_FEATURE (1625)..(1625): Absent or Gln
  MISC_FEATURE (1626)..(1626): Absent or Lys
  MISC_FEATURE (1627)..(1627): Absent or Leu
  MISC_FEATURE (1628)..(1628): Absent or Val
  MISC_FEATURE (1629)..(1629): Absent or Glu
  MISC_FEATURE (1630)..(1630): Absent or Leu
  MISC_FEATURE (1631)..(1631): Absent or Ala
  MISC_FEATURE (1632)..(1632): Absent or Asp
  MISC_FEATURE (1633)..(1633): Absent or Ala
  MISC_FEATURE (1634)..(1634): Absent or Gly
  MISC_FEATURE (1635)..(1635): Absent or Leu
  MISC_FEATURE (1636)..(1636): Absent or Pro
  MISC_FEATURE (1637)..(1637): Absent or Ile
  MISC_FEATURE (1638)..(1638): Absent or Val
  MISC_FEATURE (1639)..(1639): Absent or Val
  MISC_FEATURE (1640)..(1640): Absent or Ile
  MISC_FEATURE (1641)..(1641): Absent or Gly
  MISC_FEATURE (1642)..(1642): Absent or Ser
  MISC_FEATURE (1643)..(1643): Absent or Leu
  MISC_FEATURE (1644)..(1644): Absent or Pro
  MISC_FEATURE (1645)..(1645): Absent or Asn
  MISC_FEATURE (1646)..(1646): Absent or Thr
  MISC_FEATURE (1647)..(1647): Absent or Thr
  MISC_FEATURE (1648)..(1648): Absent or Ile
  MISC_FEATURE (1649)..(1649): Absent or Gly
  MISC_FEATURE (1650)..(1650): Absent or Ser
  MISC_FEATURE (1651)..(1651): Absent or Asn
  MISC_FEATURE (1652)..(1652): Absent or Gly
  MISC_FEATURE (1653)..(1653): Absent or Gln
  MISC_FEATURE (1654)..(1654): Absent or Asp
  MISC_FEATURE (1655)..(1655): Absent or Ile
  MISC_FEATURE (1656)..(1656): Absent or Val
  MISC_FEATURE (1657)..(1657): Absent or Ser
  MISC_FEATURE (1658)..(1658): Absent or Lys
  MISC_FEATURE (1659)..(1659): Absent or Ser
  MISC_FEATURE (1660)..(1660): Absent or Val
  MISC_FEATURE (1661)..(1661): Absent or Ala
  MISC_FEATURE (1662)..(1662): Absent or Lys
  MISC_FEATURE (1663)..(1663): Absent or Leu
  MISC_FEATURE (1664)..(1664): Absent or Gln
  MISC_FEATURE (1665)..(1665): Absent or Gly
  MISC_FEATURE (1666)..(1666): Absent or Ser
  MISC_FEATURE (1667)..(1667): Absent or Lys
  MISC_FEATURE (1668)..(1668): Absent or His
  MISC_FEATURE (1669)..(1669): Absent or Ser
  MISC_FEATURE (1670)..(1670): Absent or Asn
  MISC_FEATURE (1671)..(1671): Absent or Val
  MISC_FEATURE (1672)..(1672): Absent or Ala
  MISC_FEATURE (1673)..(1673): Absent or Phe
  MISC_FEATURE (1674)..(1674): Absent or Ile
  MISC_FEATURE (1675)..(1675): Absent or Lys
  MISC_FEATURE (1676)..(1676): Absent or Ser
  MISC_FEATURE (1677)..(1677): Absent or Ser
  MISC_FEATURE (1678)..(1678): Absent or Asp
  MISC_FEATURE (1679)..(1679): Absent or Asp
  MISC_FEATURE (1680)..(1680): Absent or Leu
  MISC_FEATURE (1681)..(1681): Absent or Phe
  MISC_FEATURE (1682)..(1682): Absent or Gly
  MISC_FEATURE (1683)..(1683): Absent or Ala
  MISC_FEATURE (1684)..(1684): Absent or Leu
  MISC_FEATURE (1685)..(1685): Absent or Asp
  MISC_FEATURE (1686)..(1686): Absent or Lys
  MISC_FEATURE (1687)..(1687): Absent or Leu
  MISC_FEATURE (1688)..(1688): Absent or Ser
  MISC_FEATURE (1689)..(1689): Absent or Val
  MISC_FEATURE (1690)..(1690): Absent or Gln
  MISC_FEATURE (1691)..(1691): Absent or Pro
  MISC_FEATURE (1692)..(1692): Absent or Arg
  MISC_FEATURE (1693)..(1693): Absent or Val
  MISC_FEATURE (1694)..(1694): Absent or Lys
  MISC_FEATURE (1695)..(1695): Absent or Thr
  MISC_FEATURE (1696)..(1696): Absent or Gly
  MISC_FEATURE (1697)..(1697): Absent or Ser
  MISC_FEATURE (1698)..(1698): Absent or Glu
  MISC_FEATURE (1699)..(1699): Absent or Ala
  MISC_FEATURE (1700)..(1700): Absent or Ala
  MISC_FEATURE (1701)..(1701): Absent or Gly
  MISC_FEATURE (1702)..(1702): Absent or Asn
  MISC_FEATURE (1703)..(1703): Absent or Leu
  MISC_FEATURE (1704)..(1704): Absent or Tyr
  MISC_FEATURE (1705)..(1705): Absent or Thr
  MISC_FEATURE (1706)..(1706): Absent or Val
  MISC_FEATURE (1707)..(1707): Absent or Trp
  MISC_FEATURE (1708)..(1708): Absent or Arg
  MISC_FEATURE (1709)..(1709): Absent or Ser
  MISC_FEATURE (1710)..(1710): Absent or Asp
  MISC_FEATURE (1711)..(1711): Absent or Lys
  MISC_FEATURE (1712)..(1712): Absent or Gly
  MISC_FEATURE (1713)..(1713): Absent or Ser
  MISC_FEATURE (1714)..(1714): Absent or Asp
  MISC_FEATURE (1715)..(1715): Absent or Tyr
  MISC_FEATURE (1716)..(1716): Absent or Leu
  MISC_FEATURE (1717)..(1717): Absent or Phe
  MISC_FEATURE (1718)..(1718): Absent or Leu
  MISC_FEATURE (1719)..(1719): Absent or Val
  MISC_FEATURE (1720)..(1720): Absent or Asn
  MISC_FEATURE (1721)..(1721): Absent or Gln
  MISC_FEATURE (1722)..(1722): Absent or Gly
  MISC_FEATURE (1723)..(1723): Absent or Ser
  MISC_FEATURE (1724)..(1724): Absent or Ser
  MISC_FEATURE (1725)..(1725): Absent or Ala
  MISC_FEATURE (1726)..(1726): Absent or Thr
  MISC_FEATURE (1727)..(1727): Absent or Phe
  MISC_FEATURE (1728)..(1728): Absent or Glu
  MISC_FEATURE (1729)..(1729): Absent or Ile
  MISC_FEATURE (1730)..(1730): Absent or Thr
  MISC_FEATURE (1731)..(1731): Absent or Ala
  MISC_FEATURE (1732)..(1732): Absent or Glu
  MISC_FEATURE (1733)..(1733): Absent or Val
  MISC_FEATURE (1734)..(1734): Absent or Glu
  MISC_FEATURE (1735)..(1735): Absent or Gln
  MISC_FEATURE (1736)..(1736): Absent or Gly
  MISC_FEATURE (1737)..(1737): Absent or Lys
  MISC_FEATURE (1738)..(1738): Absent or Val
  MISC_FEATURE (1739)..(1739): Absent or Pro
  MISC_FEATURE (1740)..(1740): Absent or Tyr
  MISC_FEATURE (1741)..(1741): Absent or Arg
  MISC_FEATURE (1742)..(1742): Absent or Leu
  MISC_FEATURE (1743)..(1743): Absent or Asn
  MISC_FEATURE (1744)..(1744): Absent or Ala
  MISC_FEATURE (1745)..(1745): Absent or Trp
  MISC_FEATURE (1746)..(1746): Absent or Thr
  MISC_FEATURE (1747)..(1747): Absent or Gly
  MISC_FEATURE (1748)..(1748): Absent or Gln
  MISC_FEATURE (1749)..(1749): Absent or Gln
  MISC_FEATURE (1750)..(1750): Absent or Val
  MISC_FEATURE (1751)..(1751): Absent or Ala
  MISC_FEATURE (1752)..(1752): Absent or Met
  MISC_FEATURE (1753)..(1753): Absent or Val
  MISC_FEATURE (1754)..(1754): Absent or Ser
  MISC_FEATURE (1755)..(1755): Absent or Phe
  MISC_FEATURE (1756)..(1756): Absent or Lys
  MISC_FEATURE (1757)..(1757): Absent or Pro
  MISC_FEATURE (1758)..(1758): Absent or Ser
  MISC_FEATURE (1759)..(1759): Absent or Ser
  MISC_FEATURE (1760)..(1760): Absent or Gly
  MISC_FEATURE (1761)..(1761): Absent or Lys
  MISC_FEATURE (1762)..(1762): Absent or Val
  MISC_FEATURE (1763)..(1763): Absent or Thr
  MISC_FEATURE (1764)..(1764): Absent or Phe
  MISC_FEATURE (1765)..(1765): Absent or Glu
  MISC_FEATURE (1766)..(1766): Absent or Val
  MISC_FEATURE (1767)..(1767): Absent or Ser
  MISC_FEATURE (1768)..(1768): Absent or Leu
  MISC_FEATURE (1769)..(1769): Absent or Lys
  MISC_FEATURE (1770)..(1770): Absent or Lys
  MISC_FEATURE (1771)..(1771): Absent or Asp
  MISC_FEATURE (1772)..(1772): Absent or Gln
  MISC_FEATURE (1773)..(1773): Absent or Thr
  MISC_FEATURE (1774)..(1774): Absent or Ala
  MISC_FEATURE (1775)..(1775): Absent or Ile
  MISC_FEATURE (1776)..(1776): Absent or Ile
  MISC_FEATURE (1777)..(1777): Absent or Ala
  MISC_FEATURE (1778)..(1778): Absent or Phe
  MISC_FEATURE (1779)..(1779): Absent or Thr
  MISC_FEATURE (1780)..(1780): Absent or Ser
  MISC_FEATURE (1781)..(1781): Absent or Lys
  MISC_FEATURE (1782)..(1782): Absent or Lys
  MISC_FEATURE (1783)..(1783): Absent or Ser
  MISC_FEATURE (1784)..(1784): Absent or Lys
  MISC_FEATURE (1785)..(1785): Absent or Thr
  MISC_FEATURE (1786)..(1786): Absent or Ser
  MISC_FEATURE (1787)..(1787): Absent or Ile
  MISC_FEATURE (1788)..(1788): Absent or Val
  MISC_FEATURE (1789)..(1789): Absent or Ser
  MISC_FEATURE (1790)..(1790): Absent or Gln
  MISC_FEATURE (1791)..(1791): Absent or Ser
  MISC_FEATURE (1792)..(1792): Absent or Lys
  MISC_FEATURE (1793)..(1793): Absent or Asn
  MISC_FEATURE (1794)..(1794): Absent or Val
  MISC_FEATURE (1795)..(1795): Absent or Ile
  MISC_FEATURE (1796)..(1796): Absent or Asp
  MISC_FEATURE (1797)..(1797): Absent or Thr
  MISC_FEATURE (1798)..(1798): Absent or Ser
  MISC_FEATURE (1799)..(1799): Absent or Tyr
  MISC_FEATURE (1800)..(1800): Absent or Asp
  MISC_FEATURE (1801)..(1801): Absent or Ser
  MISC_FEATURE (1802)..(1802): Absent or Thr
  MISC_FEATURE (1803)..(1803): Absent or Gly
  MISC_FEATURE (1804)..(1804): Absent or Asp
  MISC_FEATURE (1805)..(1805): Absent or Gly
  MISC_FEATURE (1806)..(1806): Absent or Leu
  MISC_FEATURE (1807)..(1807): Absent or Thr
  MISC_FEATURE (1808)..(1808): Absent or Val
  MISC_FEATURE (1809)..(1809): Absent or Val
  MISC_FEATURE (1810)..(1810): Absent or Leu
  MISC_FEATURE (1811)..(1811): Absent or Gly
  MISC_FEATURE (1812)..(1812): Absent or Asp
  MISC_FEATURE (1813)..(1813): Absent or Thr
  MISC_FEATURE (1814)..(1814): Absent or Lys
  MISC_FEATURE (1815)..(1815): Absent or Ala
  MISC_FEATURE (1816)..(1816): Absent or Ala
  MISC_FEATURE (1817)..(1817): Absent or Ser
  MISC_FEATURE (1818)..(1818): Absent or Leu
  MISC_FEATURE (1819)..(1819): Absent or Thr
  MISC_FEATURE (1820)..(1820): Absent or Leu
  MISC_FEATURE (1821)..(1821): Absent or Ser
  MISC_FEATURE (1822)..(1822): Absent or Asn
  MISC_FEATURE (1823)..(1823): Absent or Gly
  MISC_FEATURE (1824)..(1824): Absent or Gln
  MISC_FEATURE (1825)..(1825): Absent or Thr
  MISC_FEATURE (1826)..(1826): Absent or Lys
  MISC_FEATURE (1827)..(1827): Absent or Lys
  MISC_FEATURE (1828)..(1828): Absent or Val
  MISC_FEATURE (1829)..(1829): Absent or Pro
  MISC_FEATURE (1830)..(1830): Absent or Ala
  MISC_FEATURE (1831)..(1831): Absent or Met
  MISC_FEATURE (1832)..(1832): Absent or Ser
  MISC_FEATURE (1833)..(1833): Absent or Ser
  MISC_FEATURE (1834)..(1834): Absent or Ser
  MISC_FEATURE (1835)..(1835): Absent or Asp
  MISC_FEATURE (1836)..(1836): Absent or Lys
  MISC_FEATURE (1837)..(1837): Absent or Lys
  MISC_FEATURE (1838)..(1838): Absent or Lys
  MISC_FEATURE (1839)..(1839): Absent or Leu
  MISC_FEATURE (1840)..(1840): Absent or Leu
  MISC_FEATURE (1841)..(1841): Absent or Asn
  MISC_FEATURE (1842)..(1842): Absent or Ile
  MISC_FEATURE (1843)..(1843): Absent or Asp
  MISC_FEATURE (1844)..(1844): Absent or Ile
  MISC_FEATURE (1845)..(1845): Absent or Ser
  MISC_FEATURE (1846)..(1846): Absent or Asn
  MISC_FEATURE (1847)..(1847): Absent or Trp
  MISC_FEATURE (1848)..(1848): Absent or Asn
  MISC_FEATURE (1849)..(1849): Absent or Leu
  MISC_FEATURE (1850)..(1850): Absent or Thr
  MISC_FEATURE (1851)..(1851): Absent or Leu
  MISC_FEATURE (1852)..(1852): Absent or Glu
  MISC_FEATURE (1853)..(1853): Absent or Ser
  MISC_FEATURE (1854)..(1854): Absent or Trp
  MISC_FEATURE (1855)..(1855): Absent or Val
  MISC_FEATURE (1856)..(1856): Absent or Pro
  MISC_FEATURE (1857)..(1857): Absent or Gly
  MISC_FEATURE (1858)..(1858): Absent or Pro
  MISC_FEATURE (1859)..(1859): Absent or Asp
  MISC_FEATURE (1860)..(1860): Absent or Glu
  MISC_FEATURE (1861)..(1861): Absent or Thr
  MISC_FEATURE (1862)..(1862): Absent or Lys
  MISC_FEATURE (1863)..(1863): Absent or Ser
  MISC_FEATURE (1864)..(1864): Absent or Ala
  MISC_FEATURE (1865)..(1865): Absent or Ser
  MISC_FEATURE (1866)..(1866): Absent or Ile
  MISC_FEATURE (1867)..(1867): Absent or Lys
  MISC_FEATURE (1868)..(1868): Absent or Lys
  MISC_FEATURE (1869)..(1869): Absent or Ala
  MISC_FEATURE (1870)..(1870): Absent or Met
  MISC_FEATURE (1871)..(1871): Absent or Asn
  MISC_FEATURE (1872)..(1872): Absent or Leu
  MISC_FEATURE (1873)..(1873): Absent or Gly
  MISC_FEATURE (1874)..(1874): Absent or Ile
  MISC_FEATURE (1875)..(1875): Absent or Gln
  MISC_FEATURE (1876)..(1876): Absent or Lys
  MISC_FEATURE (1877)..(1877): Absent or Thr
  MISC_FEATURE (1878)..(1878): Absent or Leu
  MISC_FEATURE (1879)..(1879): Absent or Lys
  MISC_FEATURE (1880)..(1880): Absent or Pro
  MISC_FEATURE (1881)..(1881): Absent or Trp
  MISC_FEATURE (1882)..(1882): Absent or Ser
  MISC_FEATURE (1883)..(1883): Absent or Glu
  MISC_FEATURE (1884)..(1884): Absent or Ile
  MISC_FEATURE (1885)..(1885): Absent or Ser
  MISC_FEATURE (1886)..(1886): Absent or Gly
  MISC_FEATURE (1887)..(1887): Absent or Ala
  MISC_FEATURE (1888)..(1888): Absent or Gln
  MISC_FEATURE (1889)..(1889): Absent or Asn
  MISC_FEATURE (1890)..(1890): Absent or Val
  MISC_FEATURE (1891)..(1891): Absent or Ser
  MISC_FEATURE (1892)..(1892): Absent or Gly
  MISC_FEATURE (1893)..(1893): Absent or Val
  MISC_FEATURE (1894)..(1894): Absent or Gly
  MISC_FEATURE (1895)..(1895): Absent or Thr
  MISC_FEATURE (1896)..(1896): Absent or Tyr
  MISC_FEATURE (1897)..(1897): Absent or Thr
  MISC_FEATURE (1898)..(1898): Absent or Thr
  MISC_FEATURE (1899)..(1899): Absent or Thr
  MISC_FEATURE (1900)..(1900): Absent or Phe
  MISC_FEATURE (1901)..(1901): Absent or Gln
  MISC_FEATURE (1902)..(1902): Absent or Val
  MISC_FEATURE (1903)..(1903): Absent or Pro
  MISC_FEATURE (1904)..(1904): Absent or Gln
  MISC_FEATURE (1905)..(1905): Absent or Val
  MISC_FEATURE (1906)..(1906): Absent or Pro
  MISC_FEATURE (1907)..(1907): Absent or Ser
  MISC_FEATURE (1908)..(1908): Absent or Lys
  MISC_FEATURE (1909)..(1909): Absent or Asp
  MISC_FEATURE (1910)..(1910): Absent or Ser
  MISC_FEATURE (1911)..(1911): Absent or Ile
  MISC_FEATURE (1912)..(1912): Absent or Val
  MISC_FEATURE (1913)..(1913): Absent or Val
  MISC_FEATURE (1914)..(1914): Absent or Leu
  MISC_FEATURE (1915)..(1915): Absent or Gln
  MISC_FEATURE (1916)..(1916): Absent or Phe
  MISC_FEATURE (1917)..(1917): Absent or Gly
  MISC_FEATURE (1918)..(1918): Absent or Pro
  MISC_FEATURE (1919)..(1919): Absent or Val
  MISC_FEATURE (1920)..(1920): Absent or Leu
  MISC_FEATURE (1921)..(1921): Absent or Asn
  MISC_FEATURE (1922)..(1922): Absent or Thr
  MISC_FEATURE (1923)..(1923): Absent or Ile
  MISC_FEATURE (1924)..(1924): Absent or Gln
  MISC_FEATURE (1925)..(1925): Absent or Ala
  MISC_FEATURE (1926)..(1926): Absent or Trp
  MISC_FEATURE (1927)..(1927): Absent or Val
  MISC_FEATURE (1928)..(1928): Absent or Asn
  MISC_FEATURE (1929)..(1929): Absent or Asp
  MISC_FEATURE (1930)..(1930): Absent or Lys
  MISC_FEATURE (1931)..(1931): Absent or Gln
  MISC_FEATURE (1932)..(1932): Absent or Leu
  MISC_FEATURE (1933)..(1933): Absent or Pro
  MISC_FEATURE (1934)..(1934): Absent or Ala
  MISC_FEATURE (1935)..(1935): Absent or Ile
  MISC_FEATURE (1936)..(1936): Absent or Asp
  MISC_FEATURE (1937)..(1937): Absent or Ile
  MISC_FEATURE (1938)..(1938): Absent or Tyr
  MISC_FEATURE (1939)..(1939): Absent or Asp
  MISC_FEATURE (1940)..(1940): Absent or Ala
  MISC_FEATURE (1941)..(1941): Absent or Gln
  MISC_FEATURE (1942)..(1942): Absent or Val
  MISC_FEATURE (1943)..(1943): Absent or Asp
  MISC_FEATURE (1944)..(1944): Absent or Val
  MISC_FEATURE (1945)..(1945): Absent or Ser
  MISC_FEATURE (1946)..(1946): Absent or Asp
  MISC_FEATURE (1947)..(1947): Absent or Tyr
  MISC_FEATURE (1948)..(1948): Absent or Leu
  MISC_FEATURE (1949)..(1949): Absent or Val
  MISC_FEATURE (1950)..(1950): Absent or Ser
  MISC_FEATURE (1951)..(1951): Absent or Gly
  MISC_FEATURE (1952)..(1952): Absent or Ser
  MISC_FEATURE (1953)..(1953): Absent or Asn
  MISC_FEATURE (1954)..(1954): Absent or Thr
  MISC_FEATURE (1955)..(1955): Absent or Ile
  MISC_FEATURE (1956)..(1956): Absent or Arg
  MISC_FEATURE (1957)..(1957): Absent or Val
  MISC_FEATURE (1958)..(1958): Absent or Glu
  MISC_FEATURE (1959)..(1959): Absent or Val
  MISC_FEATURE (1960)..(1960): Absent or Ala
  MISC_FEATURE (1961)..(1961): Absent or Ser
  MISC_FEATURE (1962)..(1962): Absent or Thr
  MISC_FEATURE (1963)..(1963): Absent or Leu
  MISC_FEATURE (1964)..(1964): Absent or Phe
  MISC_FEATURE (1965)..(1965): Absent or Asn
  MISC_FEATURE (1966)..(1966): Absent or Ala
  MISC_FEATURE (1967)..(1967): Absent or Val
  MISC_FEATURE (1968)..(1968): Absent or Lys
  MISC_FEATURE (1969)..(1969): Absent or Ala
  MISC_FEATURE (1970)..(1970): Absent or Arg
  MISC_FEATURE (1971)..(1971): Absent or Val
  MISC_FEATURE (1972)..(1972): Absent or Asn
  MISC_FEATURE (1973)..(1973): Absent or Tyr
  MISC_FEATURE (1974)..(1974): Absent or Val
  MISC_FEATURE (1975)..(1975): Absent or Lys
  MISC_FEATURE (1976)..(1976): Absent or Ala
  MISC_FEATURE (1977)..(1977): Absent or Asn
  MISC_FEATURE (1978)..(1978): Absent or Gly
  MISC_FEATURE (1979)..(1979): Absent or Ile
  MISC_FEATURE (1980)..(1980): Absent or Gly
  MISC_FEATURE (1981)..(1981): Absent or Pro
  MISC_FEATURE (1982)..(1982): Absent or Ala
  MISC_FEATURE (1983)..(1983): Absent or Ala
  MISC_FEATURE (1984)..(1984): Absent or Pro
  MISC_FEATURE (1985)..(1985): Absent or Ala
  MISC_FEATURE (1986)..(1986): Absent or Leu
  MISC_FEATURE (1987)..(1987): Absent or Tyr
  MISC_FEATURE (1988)..(1988): Absent or Thr
  MISC_FEATURE (1989)..(1989): Absent or Ser
  MISC_FEATURE (1990)..(1990): Absent or Ala
  MISC_FEATURE (1991)..(1991): Absent or Asp
  MISC_FEATURE (1992)..(1992): Absent or Trp
  MISC_FEATURE (1993)..(1993): Absent or Gln
  MISC_FEATURE (1994)..(1994): Absent or Lys
  MISC_FEATURE (1995)..(1995): Absent or His
  MISC_FEATURE (1996)..(1996): Absent or Gly
  MISC_FEATURE (1997)..(1997): Absent or Leu
  MISC_FEATURE (1998)..(1998): Absent or Val
  MISC_FEATURE (1999)..(1999): Absent or Gly
  MISC_FEATURE (2000)..(2000): Absent or Pro
  MISC_FEATURE (2001)..(2001): Absent or Val
  MISC_FEATURE (2002)..(2002): Absent or Ser
  MISC_FEATURE (2003)..(2003): Absent or Leu
  MISC_FEATURE (2004)..(2004): Absent or Lys
  MISC_FEATURE (2005)..(2005): Absent or Ser
  MISC_FEATURE (2006)..(2006): Absent or Leu
  MISC_FEATURE (2007)..(2007): Absent or Arg
  MISC_FEATURE (2008)..(2008): Absent or Lys
  MISC_FEATURE (2009)..(2009): Absent or Val
  MISC_FEATURE (2010)..(2010): Absent or Asn
  MISC_FEATURE (2011)..(2011): Absent or Leu
XXXXXXXXXXXXXXXXXXXXXXXXXXXXXXXXXXXXXXXXXXXXXXXXXXXXXXXXXXXXXXXXXXXXXXXXXXXXXXXXXXXXXXXXXXXXXXXXXXXXXXXXXXXXXXXXXXXXXXXXXXXXXXXXXXXXXXXXXXXXXXXXXXXXXXXXXXXXXXXXXXXXXXXXXXXXXXXXXXXXXXXXXXXXXXXXXXXXXXXXXXXXXXXXXXXXXXXXXXXXXXXXXXXXXXXXXXXXXXXXXXXXXXXXXXXXXXXXXXXXXXXXXXXXXXXXXXXXXXXXXXXXXXXXXXXXXXXXXXXXXXXXXXXXXXXXXXXXXXXXXXXXXXXXXXXXXXXXXXXXXXXXXXXXXXXLXYSSGTTGXXPKGVXLTHXXXXXXXXXXXXXXXXXXXXXXXXXXXXXXXXXXXXXXXXXXXXXXXXXXXXXXXXXXXXXXXXXXXXXXXXXXXVXLCXLPXFHIYXXXXXXXXXXXXXXXXXXXXXXXXXXXGXXXXXXXXXFXXXXXLXXXQXXXVTXXXXVPPIXXXXXKXXXXXXXXXXXXXXXXXXXXSSXRXXXSGAAPLGKELXXXXXXXXPXXXXXXXXXXXXXXXXXXXXXXXXXXXXXXXXXXXXXXXXXXXXXXXXXXXXXXXXXXXXXXXXGXTEXXXXXXXXXXXXXXXXXXXXXXXXXXXXXXXXXXXXXXXXXXXXXXXXXXXXXXXXXXXXXXXXXXXXXXXXXXXXXXXXXXXXXXXXXXXXXXXXXXXXXXXXXXXXXXXXXXXXXXXXXXXXXXXXXXXXXXXXXXXXXXXXXXXXXXXXXXXXXXXXXXXXXXXXXXXXXXXXXXXXXXXXXXXXXXXXXXXXXXXXXXXXXXXXXXXXXXXXXXXXXXXXXXXXXXXXXXXXXXXXXXXXXXXXXXXXXXXXXXXXXXXXXXXXXXXXXXXXXXXXXXXXXXXXXXXXXXXXXXXXXXXXXXXXXXXXXXXXXXXXXXXXXXXXXXXXXXXXXXXXXXXXXXXXXXXXXXXXXXXXXXXXXXXXXXXXXXXXXXXXXXXXXXXXXXXXXXXXXXXXXXXXXXXXXXXXXXXXXXXXXXXXXXXXXXXXXXXXXXXXXXXXXXXXXXXXXXXXXXXXXXXXXXXXXXXXXXXXXXXXXXXXXXXXXXXXXXXXXXXXXXXXXXXXXXXXXXXXXXXXXXXXXXXXXXXXXXXXXXXXXXXXXXXXXXXXXXXXXXXXXXXXXXXXXXXXXXXXXXXXXXXXXXXXXXXXXXXXXXXXXXXXXXXXXXXXXXXXXXXXXXXXXXXXXXXXXXXXXXXXXXXXXXXXXXXXXXXXXXXXXXXXXXXXXXXXXXXXXXXXXXXXXXXXXXXXXXXXXXXXXXXXXXXXXXXXXXXXXXXXXXXXXXXXXXXXXXXXXXXXXXXXXXXXXXXXXXXXXXXXXXXXXXXXXXXXXXXXXXXXXXXXXXXXXXXXXXXXXXXXXXXXXXXXXXXXXXXXXXXXXXXXXXXXXXXXXXXXXXXXXXXXXXXXXXXXXXXXXXXXXXXXXXXXXXXXXXXXXXXXXXXXXXXXXXXXXXXXXXXXXXXXXXXXXXXXXXXXXXXXXXXXXXXXXXXXXXXXXXXXXXXXXXXXXXXXXXXXXXXXXXXXXXXXXXXXXXXXXXXXXXXXXXXXXXXXXXXXXXXXXXXXXXXXXXXXXXXXXXXXXXXXXXXXXXXXXXXXXXXXXXXXXXXXXXXXXXXXXXXXXXXXXXXXXXXXXXXXXXXXXXXXXXXXXXXXXXXXXXXXXXXXXXXXXXXXXXXXXXXXXXXXXXXXXXXXXXXXXXXXXXXXXXXXXXXXXXXXXXXXXXXXXXXXXXXXXXXXXXXXXXXXXXXXXXXXXXXXXXXXXXXXXXXXXXXXXXXXXXXXXXXXXXXXXXXXXXXXXXXXXXXXXXXXXXXXXXXXXXXXXXXXXXXXXXXXXXXXXXXXXXXXXXXXXXXXXXXXXXXXXXXXXXXXXXXXXXXXXXXXXXXXXXXXXXXXXXXXXXXXXXXXXXXXXXXXXXXXXXXXXXXXXXXXXXXXX
